United States Patent Application Publication US 2024/0182894 A1 - sequence listing, part 2

SEQ ID NO: 32749 - RNA, 14 nt, Artificial Sequence
  Description of Artificial Sequence: Synthetic oligonucleotide
ucauuuuuaauaaa

SEQ ID NO: 32750 - RNA, 14 nt, Artificial Sequence
  Description of Artificial Sequence: Synthetic oligonucleotide
aucauuuuuaauaa

SEQ ID NO: 32751 - RNA, 14 nt, Artificial Sequence
  Description of Artificial Sequence: Synthetic oligonucleotide
aaucauuuuuaaua

SEQ ID NO: 32752 - RNA, 14 nt, Artificial Sequence
  Description of Artificial Sequence: Synthetic oligonucleotide
gaaucauuuuuaau

SEQ ID NO: 32753 - RNA, 14 nt, Artificial Sequence
  Description of Artificial Sequence: Synthetic oligonucleotide
cgaaucauuuuuaa

SEQ ID NO: 32754 - RNA, 14 nt, Artificial Sequence
  Description of Artificial Sequence: Synthetic oligonucleotide
gcgaaucauuuuua

SEQ ID NO: 32755 - RNA, 14 nt, Artificial Sequence
  Description of Artificial Sequence: Synthetic oligonucleotide
ggcgaaucauuuuu

SEQ ID NO: 32756 - RNA, 14 nt, Artificial Sequence
  Description of Artificial Sequence: Synthetic oligonucleotide
uggcgaaucauuuu

SEQ ID NO: 32757 - RNA, 14 nt, Artificial Sequence
  Description of Artificial Sequence: Synthetic oligonucleotide
auggcgaaucauuu

SEQ ID NO: 32758 - RNA, 14 nt, Artificial Sequence
  Description of Artificial Sequence: Synthetic oligonucleotide
uauggcgaaucauu

SEQ ID NO: 32759 - RNA, 14 nt, Artificial Sequence
  Description of Artificial Sequence: Synthetic oligonucleotide
guauggcgaaucau

SEQ ID NO: 32760 - RNA, 14 nt, Artificial Sequence
  Description of Artificial Sequence: Synthetic oligonucleotide
gguauggcgaauca

SEQ ID NO: 32761 - RNA, 14 nt, Artificial Sequence
  Description of Artificial Sequence: Synthetic oligonucleotide
ugguauggcgaauc

SEQ ID NO: 32762 - RNA, 14 nt, Artificial Sequence
  Description of Artificial Sequence: Synthetic oligonucleotide
gugguauggcgaau

SEQ ID NO: 32763 - RNA, 14 nt, Artificial Sequence
  Description of Artificial Sequence: Synthetic oligonucleotide
ugugguauggcgaa

SEQ ID NO: 32764 - RNA, 14 nt, Artificial Sequence
  Description of Artificial Sequence: Synthetic oligonucleotide
uugugguauggcga

SEQ ID NO: 32765 - RNA, 14 nt, Artificial Sequence
  Description of Artificial Sequence: Synthetic oligonucleotide
uuugugguauggcg

SEQ ID NO: 32766 - RNA, 14 nt, Artificial Sequence
  Description of Artificial Sequence: Synthetic oligonucleotide
auuugugguauggc

SEQ ID NO: 32767 - RNA, 14 nt, Artificial Sequence
  Description of Artificial Sequence: Synthetic oligonucleotide
gauuugugguaugg

SEQ ID NO: 32768 - RNA, 14 nt, Artificial Sequence
  Description of Artificial Sequence: Synthetic oligonucleotide
agauuugugguaug

SEQ ID NO: 32769 - RNA, 14 nt, Artificial Sequence
  Description of Artificial Sequence: Synthetic oligonucleotide
gagauuugugguau

SEQ ID NO: 32770 - RNA, 14 nt, Artificial Sequence
  Description of Artificial Sequence: Synthetic oligonucleotide
ugagauuuguggua

SEQ ID NO: 32771 - RNA, 14 nt, Artificial Sequence
  Description of Artificial Sequence: Synthetic oligonucleotide
gugagauuuguggu

SEQ ID NO: 32772 - RNA, 14 nt, Artificial Sequence
  Description of Artificial Sequence: Synthetic oligonucleotide
ggugagauuugugg

SEQ ID NO: 32773 - RNA, 14 nt, Artificial Sequence
  Description of Artificial Sequence: Synthetic oligonucleotide
gggugagauuugug

SEQ ID NO: 32774 - RNA, 14 nt, Artificial Sequence
  Description of Artificial Sequence: Synthetic oligonucleotide
agggugagauuugu

SEQ ID NO: 32775 - RNA, 14 nt, Artificial Sequence
  Description of Artificial Sequence: Synthetic oligonucleotide
gagggugagauuug

SEQ ID NO: 32776 - RNA, 14 nt, Artificial Sequence
  Description of Artificial Sequence: Synthetic oligonucleotide
agagggugagauuu

SEQ ID NO: 32777 - RNA, 14 nt, Artificial Sequence
  Description of Artificial Sequence: Synthetic oligonucleotide
cagagggugagauu

SEQ ID NO: 32778 - RNA, 14 nt, Artificial Sequence
  Description of Artificial Sequence: Synthetic oligonucleotide
ccagagggugagau

SEQ ID NO: 32779 - RNA, 14 nt, Artificial Sequence
  Description of Artificial Sequence: Synthetic oligonucleotide
accagagggugaga

SEQ ID NO: 32780 - RNA, 14 nt, Artificial Sequence
  Description of Artificial Sequence: Synthetic oligonucleotide
aaccagagggugag

SEQ ID NO: 32781 - RNA, 14 nt, Artificial Sequence
  Description of Artificial Sequence: Synthetic oligonucleotide
aaaccagaggguga

SEQ ID NO: 32782 - RNA, 14 nt, Artificial Sequence
  Description of Artificial Sequence: Synthetic oligonucleotide
caaaccagagggug

SEQ ID NO: 32783 - RNA, 14 nt, Artificial Sequence
  Description of Artificial Sequence: Synthetic oligonucleotide
ucaaaccagagggu

SEQ ID NO: 32784 - RNA, 14 nt, Artificial Sequence
  Description of Artificial Sequence: Synthetic oligonucleotide
uucaaaccagaggg

SEQ ID NO: 32785 - RNA, 14 nt, Artificial Sequence
  Description of Artificial Sequence: Synthetic oligonucleotide
uuucaaaccagagg

SEQ ID NO: 32786 - RNA, 14 nt, Artificial Sequence
  Description of Artificial Sequence: Synthetic oligonucleotide
uuuucaaaccagag

SEQ ID NO: 32787 - RNA, 14 nt, Artificial Sequence
  Description of Artificial Sequence: Synthetic oligonucleotide
uuuuucaaaccaga

SEQ ID NO: 32788 - RNA, 14 nt, Artificial Sequence
  Description of Artificial Sequence: Synthetic oligonucleotide
auuuuucaaaccag

SEQ ID NO: 32789 - RNA, 14 nt, Artificial Sequence
  Description of Artificial Sequence: Synthetic oligonucleotide
cauuuuucaaacca

SEQ ID NO: 32790 - RNA, 14 nt, Artificial Sequence
  Description of Artificial Sequence: Synthetic oligonucleotide
gcauuuuucaaacc

SEQ ID NO: 32791 - RNA, 14 nt, Artificial Sequence
  Description of Artificial Sequence: Synthetic oligonucleotide
ugcauuuuucaaac

SEQ ID NO: 32792 - RNA, 14 nt, Artificial Sequence
  Description of Artificial Sequence: Synthetic oligonucleotide
augcauuuuucaaa

SEQ ID NO: 32793 - RNA, 14 nt, Artificial Sequence
  Description of Artificial Sequence: Synthetic oligonucleotide
aaugcauuuuucaa

SEQ ID NO: 32794 - RNA, 14 nt, Artificial Sequence
  Description of Artificial Sequence: Synthetic oligonucleotide
caaugcauuuuuca

SEQ ID NO: 32795 - RNA, 14 nt, Artificial Sequence
  Description of Artificial Sequence: Synthetic oligonucleotide
acaaugcauuuuuc

SEQ ID NO: 32796 - RNA, 14 nt, Artificial Sequence
  Description of Artificial Sequence: Synthetic oligonucleotide
cacaaugcauuuuu

SEQ ID NO: 32797 - RNA, 14 nt, Artificial Sequence
  Description of Artificial Sequence: Synthetic oligonucleotide
ccacaaugcauuuu

SEQ ID NO: 32798 - RNA, 14 nt, Artificial Sequence
  Description of Artificial Sequence: Synthetic oligonucleotide
uccacaaugcauuu

SEQ ID NO: 32799 - RNA, 14 nt, Artificial Sequence
  Description of Artificial Sequence: Synthetic oligonucleotide
uuccacaaugcauu

SEQ ID NO: 32800 - RNA, 14 nt, Artificial Sequence
  Description of Artificial Sequence: Synthetic oligonucleotide
cuuccacaaugcau

SEQ ID NO: 32801 - RNA, 14 nt, Artificial Sequence
  Description of Artificial Sequence: Synthetic oligonucleotide
gcuuccacaaugca

SEQ ID NO: 32802 - RNA, 14 nt, Artificial Sequence
  Description of Artificial Sequence: Synthetic oligonucleotide
ugcuuccacaaugc

SEQ ID NO: 32803 - RNA, 14 nt, Artificial Sequence
  Description of Artificial Sequence: Synthetic oligonucleotide
cugcuuccacaaug

SEQ ID NO: 32804 - RNA, 14 nt, Artificial Sequence
  Description of Artificial Sequence: Synthetic oligonucleotide
ucugcuuccacaau

SEQ ID NO: 32805 - RNA, 14 nt, Artificial Sequence
  Description of Artificial Sequence: Synthetic oligonucleotide
uucugcuuccacaa

SEQ ID NO: 32806 - RNA, 14 nt, Artificial Sequence
  Description of Artificial Sequence: Synthetic oligonucleotide
uuucugcuuccaca

SEQ ID NO: 32807 - RNA, 14 nt, Artificial Sequence
  Description of Artificial Sequence: Synthetic oligonucleotide
uuuucugcuuccac

SEQ ID NO: 32808 - RNA, 14 nt, Artificial Sequence
  Description of Artificial Sequence: Synthetic oligonucleotide
auuuucugcuucca

SEQ ID NO: 32809 - RNA, 14 nt, Artificial Sequence
  Description of Artificial Sequence: Synthetic oligonucleotide
aauuuucugcuucc

SEQ ID NO: 32810 - RNA, 14 nt, Artificial Sequence
  Description of Artificial Sequence: Synthetic oligonucleotide
aaauuuucugcuuc

SEQ ID NO: 32811 - RNA, 14 nt, Artificial Sequence
  Description of Artificial Sequence: Synthetic oligonucleotide
aaaauuuucugcuu

SEQ ID NO: 32812 - RNA, 14 nt, Artificial Sequence
  Description of Artificial Sequence: Synthetic oligonucleotide
caaaauuuucugcu

SEQ ID NO: 32813 - RNA, 14 nt, Artificial Sequence
  Description of Artificial Sequence: Synthetic oligonucleotide
ucaaaauuuucugc

SEQ ID NO: 32814 - RNA, 14 nt, Artificial Sequence
  Description of Artificial Sequence: Synthetic oligonucleotide
uucaaaauuuucug

SEQ ID NO: 32815 - RNA, 14 nt, Artificial Sequence
  Description of Artificial Sequence: Synthetic oligonucleotide
cuucaaaauuuucu

SEQ ID NO: 32816 - RNA, 14 nt, Artificial Sequence
  Description of Artificial Sequence: Synthetic oligonucleotide
ucuucaaaauuuuc

SEQ ID NO: 32817 - RNA, 14 nt, Artificial Sequence
  Description of Artificial Sequence: Synthetic oligonucleotide
uucuucaaaauuuu

SEQ ID NO: 32818 - RNA, 14 nt, Artificial Sequence
  Description of Artificial Sequence: Synthetic oligonucleotide
guucuucaaaauuu

SEQ ID NO: 32819 - RNA, 14 nt, Artificial Sequence
  Description of Artificial Sequence: Synthetic oligonucleotide
cguucuucaaaauu

SEQ ID NO: 32820 - RNA, 14 nt, Artificial Sequence
  Description of Artificial Sequence: Synthetic oligonucleotide
ccguucuucaaaau

SEQ ID NO: 32821 - RNA, 14 nt, Artificial Sequence
  Description of Artificial Sequence: Synthetic oligonucleotide
cccguucuucaaaa

SEQ ID NO: 32822 - RNA, 14 nt, Artificial Sequence
  Description of Artificial Sequence: Synthetic oligonucleotide
acccguucuucaaa

SEQ ID NO: 32823 - RNA, 14 nt, Artificial Sequence
  Description of Artificial Sequence: Synthetic oligonucleotide
cacccguucuucaa

SEQ ID NO: 32824 - RNA, 14 nt, Artificial Sequence
  Description of Artificial Sequence: Synthetic oligonucleotide
ccacccguucuuca

SEQ ID NO: 32825 - RNA, 14 nt, Artificial Sequence
  Description of Artificial Sequence: Synthetic oligonucleotide
gccacccguucuuc

SEQ ID NO: 32826 - RNA, 14 nt, Artificial Sequence
  Description of Artificial Sequence: Synthetic oligonucleotide
ugccacccguucuu

SEQ ID NO: 32827 - RNA, 14 nt, Artificial Sequence
  Description of Artificial Sequence: Synthetic oligonucleotide
cugccacccguucu

SEQ ID NO: 32828 - RNA, 14 nt, Artificial Sequence
  Description of Artificial Sequence: Synthetic oligonucleotide
acugccacccguuc

SEQ ID NO: 32829 - RNA, 14 nt, Artificial Sequence
  Description of Artificial Sequence: Synthetic oligonucleotide
uacugccacccguu

SEQ ID NO: 32830 - RNA, 14 nt, Artificial Sequence
  Description of Artificial Sequence: Synthetic oligonucleotide
guacugccacccgu

SEQ ID NO: 32831 - RNA, 14 nt, Artificial Sequence
  Description of Artificial Sequence: Synthetic oligonucleotide
aguacugccacccg

SEQ ID NO: 32832 - RNA, 14 nt, Artificial Sequence
  Description of Artificial Sequence: Synthetic oligonucleotide
uaguacugccaccc

SEQ ID NO: 32833 - RNA, 14 nt, Artificial Sequence
  Description of Artificial Sequence: Synthetic oligonucleotide
uuaguacugccacc

SEQ ID NO: 32834 - RNA, 14 nt, Artificial Sequence
  Description of Artificial Sequence: Synthetic oligonucleotide
cuuaguacugccac

SEQ ID NO: 32835 - RNA, 14 nt, Artificial Sequence
  Description of Artificial Sequence: Synthetic oligonucleotide
acuuaguacugcca

SEQ ID NO: 32836 - RNA, 14 nt, Artificial Sequence
  Description of Artificial Sequence: Synthetic oligonucleotide
uacuuaguacugcc

SEQ ID NO: 32837 - RNA, 14 nt, Artificial Sequence
  Description of Artificial Sequence: Synthetic oligonucleotide
cuacuuaguacugc

SEQ ID NO: 32838 - RNA, 14 nt, Artificial Sequence
  Description of Artificial Sequence: Synthetic oligonucleotide
ucuacuuaguacug

SEQ ID NO: 32839 - RNA, 14 nt, Artificial Sequence
  Description of Artificial Sequence: Synthetic oligonucleotide
uucuacuuaguacu

SEQ ID NO: 32840 - RNA, 14 nt, Artificial Sequence
  Description of Artificial Sequence: Synthetic oligonucleotide
auucuacuuaguac

SEQ ID NO: 32841 - RNA, 14 nt, Artificial Sequence
  Description of Artificial Sequence: Synthetic oligonucleotide
aauucuacuuagua

SEQ ID NO: 32842 - RNA, 14 nt, Artificial Sequence
  Description of Artificial Sequence: Synthetic oligonucleotide
uaauucuacuuagu

SEQ ID NO: 32843 - RNA, 14 nt, Artificial Sequence
  Description of Artificial Sequence: Synthetic oligonucleotide
auaauucuacuuag

SEQ ID NO: 32844 - RNA, 14 nt, Artificial Sequence
  Description of Artificial Sequence: Synthetic oligonucleotide
uauaauucuacuua

SEQ ID NO: 32845 - RNA, 14 nt, Artificial Sequence
  Description of Artificial Sequence: Synthetic oligonucleotide
cuauaauucuacuu

SEQ ID NO: 32846 - RNA, 14 nt, Artificial Sequence
  Description of Artificial Sequence: Synthetic oligonucleotide
ucuauaauucuacu

SEQ ID NO: 32847 - RNA, 14 nt, Artificial Sequence
  Description of Artificial Sequence: Synthetic oligonucleotide
uucuauaauucuac

SEQ ID NO: 32848 - RNA, 14 nt, Artificial Sequence
  Description of Artificial Sequence: Synthetic oligonucleotide
uuucuauaauucua

SEQ ID NO: 32849 - RNA, 14 nt, Artificial Sequence
  Description of Artificial Sequence: Synthetic oligonucleotide
auuucuauaauucu

SEQ ID NO: 32850 - RNA, 14 nt, Artificial Sequence
  Description of Artificial Sequence: Synthetic oligonucleotide
aauuucuauaauuc

SEQ ID NO: 32851 - RNA, 14 nt, Artificial Sequence
  Description of Artificial Sequence: Synthetic oligonucleotide
gaauuucuauaauu

SEQ ID NO: 32852 - RNA, 14 nt, Artificial Sequence
  Description of Artificial Sequence: Synthetic oligonucleotide
agaauuucuauaau

SEQ ID NO: 32853 - RNA, 14 nt, Artificial Sequence
  Description of Artificial Sequence: Synthetic oligonucleotide
cagaauuucuauaa

SEQ ID NO: 32854 - RNA, 14 nt, Artificial Sequence
  Description of Artificial Sequence: Synthetic oligonucleotide
gcagaauuucuaua

SEQ ID NO: 32855 - RNA, 14 nt, Artificial Sequence
  Description of Artificial Sequence: Synthetic oligonucleotide
ugcagaauuucuau

SEQ ID NO: 32856 - RNA, 14 nt, Artificial Sequence
  Description of Artificial Sequence: Synthetic oligonucleotide
uugcagaauuucua

SEQ ID NO: 32857 - RNA, 14 nt, Artificial Sequence
  Description of Artificial Sequence: Synthetic oligonucleotide
cuugcagaauuucu

SEQ ID NO: 32858 - RNA, 14 nt, Artificial Sequence
  Description of Artificial Sequence: Synthetic oligonucleotide
acuugcagaauuuc

SEQ ID NO: 32859 - RNA, 14 nt, Artificial Sequence
  Description of Artificial Sequence: Synthetic oligonucleotide
aacuugcagaauuu

SEQ ID NO: 32860 - RNA, 14 nt, Artificial Sequence
  Description of Artificial Sequence: Synthetic oligonucleotide
aaacuugcagaauu

SEQ ID NO: 32861 - RNA, 14 nt, Artificial Sequence
  Description of Artificial Sequence: Synthetic oligonucleotide
aaaacuugcagaau

SEQ ID NO: 32862 - RNA, 14 nt, Artificial Sequence
  Description of Artificial Sequence: Synthetic oligonucleotide
aaaaacuugcagaa

SEQ ID NO: 32863 - RNA, 14 nt, Artificial Sequence
  Description of Artificial Sequence: Synthetic oligonucleotide
gaaaaacuugcaga

SEQ ID NO: 32864 - RNA, 14 nt, Artificial Sequence
  Description of Artificial Sequence: Synthetic oligonucleotide
ugaaaaacuugcag

SEQ ID NO: 32865 - RNA, 14 nt, Artificial Sequence
  Description of Artificial Sequence: Synthetic oligonucleotide
uugaaaaacuugca

SEQ ID NO: 32866 - RNA, 14 nt, Artificial Sequence
  Description of Artificial Sequence: Synthetic oligonucleotide
cuugaaaaacuugc

SEQ ID NO: 32867 - RNA, 14 nt, Artificial Sequence
  Description of Artificial Sequence: Synthetic oligonucleotide
ucuugaaaaacuug

SEQ ID NO: 32868 - RNA, 14 nt, Artificial Sequence
  Description of Artificial Sequence: Synthetic oligonucleotide
aucuugaaaaacuu

SEQ ID NO: 32869 - RNA, 14 nt, Artificial Sequence
  Description of Artificial Sequence: Synthetic oligonucleotide
aaucuugaaaaacu

SEQ ID NO: 32870 - RNA, 14 nt, Artificial Sequence
  Description of Artificial Sequence: Synthetic oligonucleotide
aaaucuugaaaaac

SEQ ID NO: 32871 - RNA, 14 nt, Artificial Sequence
  Description of Artificial Sequence: Synthetic oligonucleotide
caaaucuugaaaaa

SEQ ID NO: 32872 - RNA, 14 nt, Artificial Sequence
  Description of Artificial Sequence: Synthetic oligonucleotide
ucaaaucuugaaaa

SEQ ID NO: 32873 - RNA, 14 nt, Artificial Sequence
  Description of Artificial Sequence: Synthetic oligonucleotide
uucaaaucuugaaa

SEQ ID NO: 32874 - RNA, 14 nt, Artificial Sequence
  Description of Artificial Sequence: Synthetic oligonucleotide
auucaaaucuugaa

SEQ ID NO: 32875 - RNA, 14 nt, Artificial Sequence
  Description of Artificial Sequence: Synthetic oligonucleotide
uauucaaaucuuga

SEQ ID NO: 32876 - RNA, 14 nt, Artificial Sequence
  Description of Artificial Sequence: Synthetic oligonucleotide
uuauucaaaucuug

SEQ ID NO: 32877 - RNA, 14 nt, Artificial Sequence
  Description of Artificial Sequence: Synthetic oligonucleotide
auuauucaaaucuu

SEQ ID NO: 32878 - RNA, 14 nt, Artificial Sequence
  Description of Artificial Sequence: Synthetic oligonucleotide
aauuauucaaaucu

SEQ ID NO: 32879 - RNA, 14 nt, Artificial Sequence
  Description of Artificial Sequence: Synthetic oligonucleotide
aaauuauucaaauc

SEQ ID NO: 32880 - RNA, 14 nt, Artificial Sequence
  Description of Artificial Sequence: Synthetic oligonucleotide
gaaauuauucaaau

SEQ ID NO: 32881 - RNA, 14 nt, Artificial Sequence
  Description of Artificial Sequence: Synthetic oligonucleotide
ugaaauuauucaaa

SEQ ID NO: 32882 - RNA, 14 nt, Artificial Sequence
  Description of Artificial Sequence: Synthetic oligonucleotide
uugaaauuauucaa

SEQ ID NO: 32883 - RNA, 14 nt, Artificial Sequence
  Description of Artificial Sequence: Synthetic oligonucleotide
auugaaauuauuca

SEQ ID NO: 32884 - RNA, 14 nt, Artificial Sequence
  Description of Artificial Sequence: Synthetic oligonucleotide
cauugaaauuauuc

SEQ ID NO: 32885 - RNA, 14 nt, Artificial Sequence
  Description of Artificial Sequence: Synthetic oligonucleotide
ccauugaaauuauu

SEQ ID NO: 32886 - RNA, 14 nt, Artificial Sequence
  Description of Artificial Sequence: Synthetic oligonucleotide
gccauugaaauuau

SEQ ID NO: 32887 - RNA, 14 nt, Artificial Sequence
  Description of Artificial Sequence: Synthetic oligonucleotide
cgccauugaaauua

SEQ ID NO: 32888 - RNA, 14 nt, Artificial Sequence
  Description of Artificial Sequence: Synthetic oligonucleotide
acgccauugaaauu

SEQ ID NO: 32889 - RNA, 14 nt, Artificial Sequence
  Description of Artificial Sequence: Synthetic oligonucleotide
uacgccauugaaau

SEQ ID NO: 32890 - RNA, 14 nt, Artificial Sequence
  Description of Artificial Sequence: Synthetic oligonucleotide
auacgccauugaaa

SEQ ID NO: 32891 - RNA, 14 nt, Artificial Sequence
  Description of Artificial Sequence: Synthetic oligonucleotide
aauacgccauugaa

SEQ ID NO: 32892 - RNA, 14 nt, Artificial Sequence
  Description of Artificial Sequence: Synthetic oligonucleotide
caauacgccauuga

SEQ ID NO: 32893 - RNA, 14 nt, Artificial Sequence
  Description of Artificial Sequence: Synthetic oligonucleotide
ccaauacgccauug

SEQ ID NO: 32894 - RNA, 14 nt, Artificial Sequence
  Description of Artificial Sequence: Synthetic oligonucleotide
uccaauacgccauu

SEQ ID NO: 32895 - RNA, 14 nt, Artificial Sequence
  Description of Artificial Sequence: Synthetic oligonucleotide
cuccaauacgccau

SEQ ID NO: 32896 - RNA, 14 nt, Artificial Sequence
  Description of Artificial Sequence: Synthetic oligonucleotide
ucuccaauacgcca

SEQ ID NO: 32897 - RNA, 14 nt, Artificial Sequence
  Description of Artificial Sequence: Synthetic oligonucleotide
aucuccaauacgcc

SEQ ID NO: 32898 - RNA, 14 nt, Artificial Sequence
  Description of Artificial Sequence: Synthetic oligonucleotide
uaucuccaauacgc

SEQ ID NO: 32899 - RNA, 14 nt, Artificial Sequence
  Description of Artificial Sequence: Synthetic oligonucleotide
cuaucuccaauacg

SEQ ID NO: 32900 - RNA, 14 nt, Artificial Sequence
  Description of Artificial Sequence: Synthetic oligonucleotide
acuaucuccaauac

SEQ ID NO: 32901 - RNA, 14 nt, Artificial Sequence
  Description of Artificial Sequence: Synthetic oligonucleotide
gacuaucuccaaua

SEQ ID NO: 32902 - RNA, 14 nt, Artificial Sequence
  Description of Artificial Sequence: Synthetic oligonucleotide
ugacuaucuccaau

SEQ ID NO: 32903 - RNA, 14 nt, Artificial Sequence
  Description of Artificial Sequence: Synthetic oligonucleotide
cugacuaucuccaa

SEQ ID NO: 32904 - RNA, 14 nt, Artificial Sequence
  Description of Artificial Sequence: Synthetic oligonucleotide
acugacuaucucca

SEQ ID NO: 32905 - RNA, 14 nt, Artificial Sequence
  Description of Artificial Sequence: Synthetic oligonucleotide
cacugacuaucucc

SEQ ID NO: 32906 - RNA, 14 nt, Artificial Sequence
  Description of Artificial Sequence: Synthetic oligonucleotide
gcacugacuaucuc

SEQ ID NO: 32907 - RNA, 14 nt, Artificial Sequence
  Description of Artificial Sequence: Synthetic oligonucleotide
ugcacugacuaucu

SEQ ID NO: 32908 - RNA, 14 nt, Artificial Sequence
  Description of Artificial Sequence: Synthetic oligonucleotide
cugcacugacuauc

SEQ ID NO: 32909 - RNA, 14 nt, Artificial Sequence
  Description of Artificial Sequence: Synthetic oligonucleotide
acugcacugacuau

SEQ ID NO: 32910 - RNA, 14 nt, Artificial Sequence
  Description of Artificial Sequence: Synthetic oligonucleotide
uacugcacugacua

SEQ ID NO: 32911 - RNA, 14 nt, Artificial Sequence
  Description of Artificial Sequence: Synthetic oligonucleotide
uuacugcacugacu

SEQ ID NO: 32912 - RNA, 14 nt, Artificial Sequence
  Description of Artificial Sequence: Synthetic oligonucleotide
uuuacugcacugac

SEQ ID NO: 32913 - RNA, 14 nt, Artificial Sequence
  Description of Artificial Sequence: Synthetic oligonucleotide
auuuacugcacuga

SEQ ID NO: 32914 - RNA, 14 nt, Artificial Sequence
  Description of Artificial Sequence: Synthetic oligonucleotide
aauuuacugcacug

SEQ ID NO: 32915 - RNA, 14 nt, Artificial Sequence
  Description of Artificial Sequence: Synthetic oligonucleotide
gaauuuacugcacu

SEQ ID NO: 32916 - RNA, 14 nt, Artificial Sequence
  Description of Artificial Sequence: Synthetic oligonucleotide
ugaauuuacugcac

SEQ ID NO: 32917 - RNA, 14 nt, Artificial Sequence
  Description of Artificial Sequence: Synthetic oligonucleotide
cugaauuuacugca

SEQ ID NO: 32918 - RNA, 14 nt, Artificial Sequence
  Description of Artificial Sequence: Synthetic oligonucleotide
acugaauuuacugc

SEQ ID NO: 32919 - RNA, 14 nt, Artificial Sequence
  Description of Artificial Sequence: Synthetic oligonucleotide
cacugaauuuacug

SEQ ID NO: 32920 - RNA, 14 nt, Artificial Sequence
  Description of Artificial Sequence: Synthetic oligonucleotide
acacugaauuuacu

SEQ ID NO: 32921 - RNA, 14 nt, Artificial Sequence
  Description of Artificial Sequence: Synthetic oligonucleotide
gacacugaauuuac

SEQ ID NO: 32922 - RNA, 14 nt, Artificial Sequence
  Description of Artificial Sequence: Synthetic oligonucleotide
ugacacugaauuua

SEQ ID NO: 32923 - RNA, 14 nt, Artificial Sequence
  Description of Artificial Sequence: Synthetic oligonucleotide
cugacacugaauuu

SEQ ID NO: 32924 - RNA, 14 nt, Artificial Sequence
  Description of Artificial Sequence: Synthetic oligonucleotide
acugacacugaauu

SEQ ID NO: 32925 - RNA, 14 nt, Artificial Sequence
  Description of Artificial Sequence: Synthetic oligonucleotide
uacugacacugaau

SEQ ID NO: 32926 - RNA, 14 nt, Artificial Sequence
  Description of Artificial Sequence: Synthetic oligonucleotide
auacugacacugaa

SEQ ID NO: 32927 - RNA, 14 nt, Artificial Sequence
  Description of Artificial Sequence: Synthetic oligonucleotide
uauacugacacuga

SEQ ID NO: 32928 - RNA, 14 nt, Artificial Sequence
  Description of Artificial Sequence: Synthetic oligonucleotide
guauacugacacug

SEQ ID NO: 32929 - RNA, 14 nt, Artificial Sequence
  Description of Artificial Sequence: Synthetic oligonucleotide
uguauacugacacu

SEQ ID NO: 32930 - RNA, 14 nt, Artificial Sequence
  Description of Artificial Sequence: Synthetic oligonucleotide
cuguauacugacac

SEQ ID NO: 32931 - RNA, 14 nt, Artificial Sequence
  Description of Artificial Sequence: Synthetic oligonucleotide
ucuguauacugaca

SEQ ID NO: 32932 - RNA, 14 nt, Artificial Sequence
  Description of Artificial Sequence: Synthetic oligonucleotide
gucuguauacugac

SEQ ID NO: 32933 - RNA, 14 nt, Artificial Sequence
  Description of Artificial Sequence: Synthetic oligonucleotide
agucuguauacuga

SEQ ID NO: 32934 - RNA, 14 nt, Artificial Sequence
  Description of Artificial Sequence: Synthetic oligonucleotide
uagucuguauacug

SEQ ID NO: 32935 - RNA, 14 nt, Artificial Sequence
  Description of Artificial Sequence: Synthetic oligonucleotide
cuagucuguauacu

SEQ ID NO: 32936 - RNA, 14 nt, Artificial Sequence
  Description of Artificial Sequence: Synthetic oligonucleotide
ucuagucuguauac

SEQ ID NO: 32937 - RNA, 14 nt, Artificial Sequence
  Description of Artificial Sequence: Synthetic oligonucleotide
gucuagucuguaua

SEQ ID NO: 32938 - RNA, 14 nt, Artificial Sequence
  Description of Artificial Sequence: Synthetic oligonucleotide
ggucuagucuguau

SEQ ID NO: 32939 - RNA, 14 nt, Artificial Sequence
  Description of Artificial Sequence: Synthetic oligonucleotide
uggucuagucugua

SEQ ID NO: 32940 - RNA, 14 nt, Artificial Sequence
  Description of Artificial Sequence: Synthetic oligonucleotide
auggucuagucugu

SEQ ID NO: 32941 - RNA, 14 nt, Artificial Sequence
  Description of Artificial Sequence: Synthetic oligonucleotide
uauggucuagucug

SEQ ID NO: 32942 - RNA, 14 nt, Artificial Sequence
  Description of Artificial Sequence: Synthetic oligonucleotide
guauggucuagucu

SEQ ID NO: 32943 - RNA, 14 nt, Artificial Sequence
  Description of Artificial Sequence: Synthetic oligonucleotide
gguauggucuaguc

SEQ ID NO: 32944 - RNA, 14 nt, Artificial Sequence
  Description of Artificial Sequence: Synthetic oligonucleotide
agguauggucuagu

SEQ ID NO: 32945 - RNA, 14 nt, Artificial Sequence
  Description of Artificial Sequence: Synthetic oligonucleotide
aagguauggucuag

SEQ ID NO: 32946 - RNA, 14 nt, Artificial Sequence
  Description of Artificial Sequence: Synthetic oligonucleotide
aaagguauggucua

SEQ ID NO: 32947 - RNA, 14 nt, Artificial Sequence
  Description of Artificial Sequence: Synthetic oligonucleotide
caaagguauggucu

SEQ ID NO: 32948 - RNA, 14 nt, Artificial Sequence
  Description of Artificial Sequence: Synthetic oligonucleotide
ucaaagguaugguc

SEQ ID NO: 32949 - RNA, 14 nt, Artificial Sequence
  Description of Artificial Sequence: Synthetic oligonucleotide
cucaaagguauggu

SEQ ID NO: 32950 - RNA, 14 nt, Artificial Sequence
  Description of Artificial Sequence: Synthetic oligonucleotide
ccucaaagguaugg

SEQ ID NO: 32951 - RNA, 14 nt, Artificial Sequence
  Description of Artificial Sequence: Synthetic oligonucleotide
gccucaaagguaug

SEQ ID NO: 32952 - RNA, 14 nt, Artificial Sequence
  Description of Artificial Sequence: Synthetic oligonucleotide
ugccucaaagguau

SEQ ID NO: 32953 - RNA, 14 nt, Artificial Sequence
  Description of Artificial Sequence: Synthetic oligonucleotide
gugccucaaaggua

SEQ ID NO: 32954 - RNA, 14 nt, Artificial Sequence
  Description of Artificial Sequence: Synthetic oligonucleotide
agugccucaaaggu

SEQ ID NO: 32955 - RNA, 14 nt, Artificial Sequence
  Description of Artificial Sequence: Synthetic oligonucleotide
cagugccucaaagg

SEQ ID NO: 32956 - RNA, 14 nt, Artificial Sequence
  Description of Artificial Sequence: Synthetic oligonucleotide
gcagugccucaaag

SEQ ID NO: 32957 - RNA, 14 nt, Artificial Sequence
  Description of Artificial Sequence: Synthetic oligonucleotide
ugcagugccucaaa

SEQ ID NO: 32958 - RNA, 14 nt, Artificial Sequence
  Description of Artificial Sequence: Synthetic oligonucleotide
cugcagugccucaa

SEQ ID NO: 32959 - RNA, 14 nt, Artificial Sequence
  Description of Artificial Sequence: Synthetic oligonucleotide
ccugcagugccuca

SEQ ID NO: 32960 - RNA, 14 nt, Artificial Sequence
  Description of Artificial Sequence: Synthetic oligonucleotide
uccugcagugccuc

SEQ ID NO: 32961 - RNA, 14 nt, Artificial Sequence
  Description of Artificial Sequence: Synthetic oligonucleotide
uuccugcagugccu

SEQ ID NO: 32962 - RNA, 14 nt, Artificial Sequence
  Description of Artificial Sequence: Synthetic oligonucleotide
uuuccugcagugcc

SEQ ID NO: 32963 - RNA, 14 nt, Artificial Sequence
  Description of Artificial Sequence: Synthetic oligonucleotide
cuuuccugcagugc

SEQ ID NO: 32964 - RNA, 14 nt, Artificial Sequence
  Description of Artificial Sequence: Synthetic oligonucleotide
ccuuuccugcagug

SEQ ID NO: 32965 - RNA, 14 nt, Artificial Sequence
  Description of Artificial Sequence: Synthetic oligonucleotide
uccuuuccugcagu

SEQ ID NO: 32966 - RNA, 14 nt, Artificial Sequence
  Description of Artificial Sequence: Synthetic oligonucleotide
uuccuuuccugcag

SEQ ID NO: 32967 - RNA, 14 nt, Artificial Sequence
  Description of Artificial Sequence: Synthetic oligonucleotide
uuuccuuuccugca

SEQ ID NO: 32968 - RNA, 14 nt, Artificial Sequence
  Description of Artificial Sequence: Synthetic oligonucleotide
uuuuccuuuccugc

SEQ ID NO: 32969 - RNA, 14 nt, Artificial Sequence
  Description of Artificial Sequence: Synthetic oligonucleotide
cuuuuccuuuccug

SEQ ID NO: 32970 - RNA, 14 nt, Artificial Sequence
  Description of Artificial Sequence: Synthetic oligonucleotide
ccuuuuccuuuccu

SEQ ID NO: 32971 - RNA, 14 nt, Artificial Sequence
  Description of Artificial Sequence: Synthetic oligonucleotide
uccuuuuccuuucc

SEQ ID NO: 32972 - RNA, 14 nt, Artificial Sequence
  Description of Artificial Sequence: Synthetic oligonucleotide
uuccuuuuccuuuc

SEQ ID NO: 32973 - RNA, 14 nt, Artificial Sequence
  Description of Artificial Sequence: Synthetic oligonucleotide
uuuccuuuuccuuu

SEQ ID NO: 32974 - RNA, 14 nt, Artificial Sequence
  Description of Artificial Sequence: Synthetic oligonucleotide
uuuuccuuuuccuu

SEQ ID NO: 32975 - RNA, 14 nt, Artificial Sequence
  Description of Artificial Sequence: Synthetic oligonucleotide
auuuuccuuuuccu

SEQ ID NO: 32976 - RNA, 14 nt, Artificial Sequence
  Description of Artificial Sequence: Synthetic oligonucleotide
aauuuuccuuuucc

SEQ ID NO: 32977 - RNA, 14 nt, Artificial Sequence
  Description of Artificial Sequence: Synthetic oligonucleotide
aaauuuuccuuuuc

SEQ ID NO: 32978 - RNA, 14 nt, Artificial Sequence
  Description of Artificial Sequence: Synthetic oligonucleotide
aaaauuuuccuuuu

SEQ ID NO: 32979 - RNA, 14 nt, Artificial Sequence
  Description of Artificial Sequence: Synthetic oligonucleotide
caaaauuuuccuuu

SEQ ID NO: 32980 - RNA, 14 nt, Artificial Sequence
  Description of Artificial Sequence: Synthetic oligonucleotide
ccaaaauuuuccuu

SEQ ID NO: 32981 - RNA, 14 nt, Artificial Sequence
  Description of Artificial Sequence: Synthetic oligonucleotide
uccaaaauuuuccu

SEQ ID NO: 32982 - RNA, 14 nt, Artificial Sequence
  Description of Artificial Sequence: Synthetic oligonucleotide
guccaaaauuuucc

SEQ ID NO: 32983 - RNA, 14 nt, Artificial Sequence
  Description of Artificial Sequence: Synthetic oligonucleotide
cguccaaaauuuuc

SEQ ID NO: 32984 - RNA, 14 nt, Artificial Sequence
  Description of Artificial Sequence: Synthetic oligonucleotide
ucguccaaaauuuu

SEQ ID NO: 32985 - RNA, 14 nt, Artificial Sequence
  Description of Artificial Sequence: Synthetic oligonucleotide
uucguccaaaauuu

SEQ ID NO: 32986 - RNA, 14 nt, Artificial Sequence
  Description of Artificial Sequence: Synthetic oligonucleotide
cuucguccaaaauu

SEQ ID NO: 32987 - RNA, 14 nt, Artificial Sequence
  Description of Artificial Sequence: Synthetic oligonucleotide
gcuucguccaaaau

SEQ ID NO: 32988 - RNA, 14 nt, Artificial Sequence
  Description of Artificial Sequence: Synthetic oligonucleotide
agcuucguccaaaa

SEQ ID NO: 32989 - RNA, 14 nt, Artificial Sequence
  Description of Artificial Sequence: Synthetic oligonucleotide
cagcuucguccaaa

SEQ ID NO: 32990 - RNA, 14 nt, Artificial Sequence
  Description of Artificial Sequence: Synthetic oligonucleotide
acagcuucguccaa

SEQ ID NO: 32991 - RNA, 14 nt, Artificial Sequence
  Description of Artificial Sequence: Synthetic oligonucleotide
cacagcuucgucca

SEQ ID NO: 32992 - RNA, 14 nt, Artificial Sequence
  Description of Artificial Sequence: Synthetic oligonucleotide
ccacagcuucgucc

SEQ ID NO: 32993 - RNA, 14 nt, Artificial Sequence
  Description of Artificial Sequence: Synthetic oligonucleotide
uccacagcuucguc

SEQ ID NO: 32994 - RNA, 14 nt, Artificial Sequence
  Description of Artificial Sequence: Synthetic oligonucleotide
uuccacagcuucgu

SEQ ID NO: 32995 - RNA, 14 nt, Artificial Sequence
  Description of Artificial Sequence: Synthetic oligonucleotide
auuccacagcuucg

SEQ ID NO: 32996 - RNA, 14 nt, Artificial Sequence
  Description of Artificial Sequence: Synthetic oligonucleotide
aauuccacagcuuc

SEQ ID NO: 32997 - RNA, 14 nt, Artificial Sequence
  Description of Artificial Sequence: Synthetic oligonucleotide
uaauuccacagcuu

SEQ ID NO: 32998 - RNA, 14 nt, Artificial Sequence
  Description of Artificial Sequence: Synthetic oligonucleotide
uuaauuccacagcu

SEQ ID NO: 32999 - RNA, 14 nt, Artificial Sequence
  Description of Artificial Sequence: Synthetic oligonucleotide
cuuaauuccacagc

SEQ ID NO: 33000 - RNA, 14 nt, Artificial Sequence
  Description of Artificial Sequence: Synthetic oligonucleotide
acuuaauuccacag

SEQ ID NO: 33001 - RNA, 14 nt, Artificial Sequence
  Description of Artificial Sequence: Synthetic oligonucleotide
gacuuaauuccaca

SEQ ID NO: 33002 - RNA, 14 nt, Artificial Sequence
  Description of Artificial Sequence: Synthetic oligonucleotide
ugacuuaauuccac

SEQ ID NO: 33003 - RNA, 14 nt, Artificial Sequence
  Description of Artificial Sequence: Synthetic oligonucleotide
uugacuuaauucca

SEQ ID NO: 33004 - RNA, 14 nt, Artificial Sequence
  Description of Artificial Sequence: Synthetic oligonucleotide
cuugacuuaauucc

SEQ ID NO: 33005 - RNA, 14 nt, Artificial Sequence
  Description of Artificial Sequence: Synthetic oligonucleotide
ucuugacuuaauuc

SEQ ID NO: 33006 - RNA, 14 nt, Artificial Sequence
  Description of Artificial Sequence: Synthetic oligonucleotide
aucuugacuuaauu

SEQ ID NO: 33007 - RNA, 14 nt, Artificial Sequence
  Description of Artificial Sequence: Synthetic oligonucleotide
gaucuugacuuaau

SEQ ID NO: 33008 - RNA, 14 nt, Artificial Sequence
  Description of Artificial Sequence: Synthetic oligonucleotide
ugaucuugacuuaa

SEQ ID NO: 33009 - RNA, 14 nt, Artificial Sequence
  Description of Artificial Sequence: Synthetic oligonucleotide
gugaucuugacuua

SEQ ID NO: 33010 - RNA, 14 nt, Artificial Sequence
  Description of Artificial Sequence: Synthetic oligonucleotide
agugaucuugacuu

SEQ ID NO: 33011 - RNA, 14 nt, Artificial Sequence
  Description of Artificial Sequence: Synthetic oligonucleotide
aagugaucuugacu

SEQ ID NO: 33012 - RNA, 14 nt, Artificial Sequence
  Description of Artificial Sequence: Synthetic oligonucleotide
aaagugaucuugac

SEQ ID NO: 33013 - RNA, 14 nt, Artificial Sequence
  Description of Artificial Sequence: Synthetic oligonucleotide
uaaagugaucuuga

SEQ ID NO: 33014 - RNA, 14 nt, Artificial Sequence
  Description of Artificial Sequence: Synthetic oligonucleotide
uuaaagugaucuug

SEQ ID NO: 33015 - RNA, 14 nt, Artificial Sequence
  Description of Artificial Sequence: Synthetic oligonucleotide
uuuaaagugaucuu

SEQ ID NO: 33016 - RNA, 14 nt, Artificial Sequence
  Description of Artificial Sequence: Synthetic oligonucleotide
uuuuaaagugaucu

SEQ ID NO: 33017 - RNA, 14 nt, Artificial Sequence
  Description of Artificial Sequence: Synthetic oligonucleotide
uuuuuaaagugauc

SEQ ID NO: 33018 - RNA, 14 nt, Artificial Sequence
  Description of Artificial Sequence: Synthetic oligonucleotide
uuuuuuaaagugau

SEQ ID NO: 33019 - RNA, 14 nt, Artificial Sequence
  Description of Artificial Sequence: Synthetic oligonucleotide
auuuuuuaaaguga

SEQ ID NO: 33020 - RNA, 14 nt, Artificial Sequence
  Description of Artificial Sequence: Synthetic oligonucleotide
uauuuuuuaaagug

SEQ ID NO: 33021 - RNA, 14 nt, Artificial Sequence
  Description of Artificial Sequence: Synthetic oligonucleotide
guauuuuuuaaagu

SEQ ID NO: 33022 - RNA, 14 nt, Artificial Sequence
  Description of Artificial Sequence: Synthetic oligonucleotide
gguauuuuuuaaag

SEQ ID NO: 33023 - RNA, 14 nt, Artificial Sequence
  Description of Artificial Sequence: Synthetic oligonucleotide
agguauuuuuuaaa

SEQ ID NO: 33024 - RNA, 14 nt, Artificial Sequence
  Description of Artificial Sequence: Synthetic oligonucleotide
uagguauuuuuuaa

SEQ ID NO: 33025 - RNA, 14 nt, Artificial Sequence
  Description of Artificial Sequence: Synthetic oligonucleotide
cuagguauuuuuua

SEQ ID NO: 33026 - RNA, 14 nt, Artificial Sequence
  Description of Artificial Sequence: Synthetic oligonucleotide
acuagguauuuuuu

SEQ ID NO: 33027 - RNA, 14 nt, Artificial Sequence
  Description of Artificial Sequence: Synthetic oligonucleotide
uacuagguauuuuu

SEQ ID NO: 33028 - RNA, 14 nt, Artificial Sequence
  Description of Artificial Sequence: Synthetic oligonucleotide
uuacuagguauuuu

SEQ ID NO: 33029 - RNA, 14 nt, Artificial Sequence
  Description of Artificial Sequence: Synthetic oligonucleotide
uuuacuagguauuu

SEQ ID NO: 33030 - RNA, 14 nt, Artificial Sequence
  Description of Artificial Sequence: Synthetic oligonucleotide
uuuuacuagguauu

SEQ ID NO: 33031 - RNA, 14 nt, Artificial Sequence
  Description of Artificial Sequence: Synthetic oligonucleotide
guuuuacuagguau

SEQ ID NO: 33032 - RNA, 14 nt, Artificial Sequence
  Description of Artificial Sequence: Synthetic oligonucleotide
aguuuuacuaggua

SEQ ID NO: 33033 - RNA, 14 nt, Artificial Sequence
  Description of Artificial Sequence: Synthetic oligonucleotide
aaguuuuacuaggu

SEQ ID NO: 33034 - RNA, 14 nt, Artificial Sequence
  Description of Artificial Sequence: Synthetic oligonucleotide
uaaguuuuacuagg

SEQ ID NO: 33035 - RNA, 14 nt, Artificial Sequence
  Description of Artificial Sequence: Synthetic oligonucleotide
uuaaguuuuacuag

SEQ ID NO: 33036 - RNA, 14 nt, Artificial Sequence
  Description of Artificial Sequence: Synthetic oligonucleotide
cuuaaguuuuacua

SEQ ID NO: 33037 - RNA, 14 nt, Artificial Sequence
  Description of Artificial Sequence: Synthetic oligonucleotide
acuuaaguuuuacu

SEQ ID NO: 33038 - RNA, 14 nt, Artificial Sequence
  Description of Artificial Sequence: Synthetic oligonucleotide
gacuuaaguuuuac

SEQ ID NO: 33039 - RNA, 14 nt, Artificial Sequence
  Description of Artificial Sequence: Synthetic oligonucleotide
ugacuuaaguuuua

SEQ ID NO: 33040 - RNA, 14 nt, Artificial Sequence
  Description of Artificial Sequence: Synthetic oligonucleotide
uugacuuaaguuuu

SEQ ID NO: 33041 - RNA, 14 nt, Artificial Sequence
  Description of Artificial Sequence: Synthetic oligonucleotide
auugacuuaaguuu

SEQ ID NO: 33042 - RNA, 14 nt, Artificial Sequence
  Description of Artificial Sequence: Synthetic oligonucleotide
gauugacuuaaguu

SEQ ID NO: 33043 - RNA, 14 nt, Artificial Sequence
  Description of Artificial Sequence: Synthetic oligonucleotide
ugauugacuuaagu

SEQ ID NO: 33044 - RNA, 14 nt, Artificial Sequence
  Description of Artificial Sequence: Synthetic oligonucleotide
uugauugacuuaag

SEQ ID NO: 33045 - RNA, 14 nt, Artificial Sequence
  Description of Artificial Sequence: Synthetic oligonucleotide
auugauugacuuaa

SEQ ID NO: 33046 - RNA, 14 nt, Artificial Sequence
  Description of Artificial Sequence: Synthetic oligonucleotide
gauugauugacuua

SEQ ID NO: 33047 - RNA, 14 nt, Artificial Sequence
  Description of Artificial Sequence: Synthetic oligonucleotide
ggauugauugacuu

SEQ ID NO: 33048 - RNA, 14 nt, Artificial Sequence
  Description of Artificial Sequence: Synthetic oligonucleotide
uggauugauugacu

SEQ ID NO: 33049 - RNA, 14 nt, Artificial Sequence
  Description of Artificial Sequence: Synthetic oligonucleotide
guggauugauugac

SEQ ID NO: 33050 - RNA, 14 nt, Artificial Sequence
  Description of Artificial Sequence: Synthetic oligonucleotide
gguggauugauuga

SEQ ID NO: 33051 - RNA, 14 nt, Artificial Sequence
  Description of Artificial Sequence: Synthetic oligonucleotide
agguggauugauug

SEQ ID NO: 33052 - RNA, 14 nt, Artificial Sequence
  Description of Artificial Sequence: Synthetic oligonucleotide
aagguggauugauu

SEQ ID NO: 33053 - RNA, 14 nt, Artificial Sequence
  Description of Artificial Sequence: Synthetic oligonucleotide
caagguggauugau

SEQ ID NO: 33054 - RNA, 14 nt, Artificial Sequence
  Description of Artificial Sequence: Synthetic oligonucleotide
acaagguggauuga

SEQ ID NO: 33055 - RNA, 14 nt, Artificial Sequence
  Description of Artificial Sequence: Synthetic oligonucleotide
cacaagguggauug

SEQ ID NO: 33056 - RNA, 14 nt, Artificial Sequence
  Description of Artificial Sequence: Synthetic oligonucleotide
acacaagguggauu

SEQ ID NO: 33057 - RNA, 14 nt, Artificial Sequence
  Description of Artificial Sequence: Synthetic oligonucleotide
cacacaagguggau

SEQ ID NO: 33058 - RNA, 14 nt, Artificial Sequence
  Description of Artificial Sequence: Synthetic oligonucleotide
gcacacaaggugga

SEQ ID NO: 33059 - RNA, 14 nt, Artificial Sequence
  Description of Artificial Sequence: Synthetic oligonucleotide
ggcacacaaggugg

SEQ ID NO: 33060 - RNA, 14 nt, Artificial Sequence
  Description of Artificial Sequence: Synthetic oligonucleotide
aggcacacaaggug

SEQ ID NO: 33061 - RNA, 14 nt, Artificial Sequence
  Description of Artificial Sequence: Synthetic oligonucleotide
aaggcacacaaggu

SEQ ID NO: 33062 - DNA, 14 bp, Artificial Sequence
  Description of Artificial Sequence: Synthetic oligonucleotide
aaaggcacacaagg

SEQ ID NO: 33063 - DNA, 14 bp, Artificial Sequence
  Description of Artificial Sequence: Synthetic oligonucleotide
aaaaggcacacaag

SEQ ID NO: 33064 - DNA, 14 bp, Artificial Sequence
  Description of Artificial Sequence: Synthetic oligonucleotide
aaaaaggcacacaa

SEQ ID NO: 33065 - DNA, 14 bp, Artificial Sequence
  Description of Artificial Sequence: Synthetic oligonucleotide
aaaaaaggcacaca

SEQ ID NO: 33066 - DNA, 14 bp, Artificial Sequence
  Description of Artificial Sequence: Synthetic oligonucleotide
aaaaaaaggcacac

SEQ ID NO: 33067 - DNA, 14 bp, Artificial Sequence
  Description of Artificial Sequence: Synthetic oligonucleotide
caaaaaaaggcaca

SEQ ID NO: 33068 - DNA, 14 bp, Artificial Sequence
  Description of Artificial Sequence: Synthetic oligonucleotide
ccaaaaaaaggcac

SEQ ID NO: 33069 - RNA, 14 nt, Artificial Sequence
  Description of Artificial Sequence: Synthetic oligonucleotide
uccaaaaaaaggca

SEQ ID NO: 33070 - RNA, 14 nt, Artificial Sequence
  Description of Artificial Sequence: Synthetic oligonucleotide
uuccaaaaaaaggc

SEQ ID NO: 33071 - RNA, 14 nt, Artificial Sequence
  Description of Artificial Sequence: Synthetic oligonucleotide
auuccaaaaaaagg

SEQ ID NO: 33072 - RNA, 14 nt, Artificial Sequence
  Description of Artificial Sequence: Synthetic oligonucleotide
uauuccaaaaaaag

SEQ ID NO: 33073 - RNA, 14 nt, Artificial Sequence
  Description of Artificial Sequence: Synthetic oligonucleotide
auauuccaaaaaaa

SEQ ID NO: 33074 - RNA, 14 nt, Artificial Sequence
  Description of Artificial Sequence: Synthetic oligonucleotide
uauauuccaaaaaa

SEQ ID NO: 33075 - RNA, 14 nt, Artificial Sequence
  Description of Artificial Sequence: Synthetic oligonucleotide
auauauuccaaaaa

SEQ ID NO: 33076 - RNA, 14 nt, Artificial Sequence
  Description of Artificial Sequence: Synthetic oligonucleotide
aauauauuccaaaa

SEQ ID NO: 33077 - RNA, 14 nt, Artificial Sequence
  Description of Artificial Sequence: Synthetic oligonucleotide
aaauauauuccaaa

SEQ ID NO: 33078 - RNA, 14 nt, Artificial Sequence
  Description of Artificial Sequence: Synthetic oligonucleotide
uaaauauauuccaa

SEQ ID NO: 33079 - RNA, 14 nt, Artificial Sequence
  Description of Artificial Sequence: Synthetic oligonucleotide
uuaaauauauucca

SEQ ID NO: 33080 - RNA, 14 nt, Artificial Sequence
  Description of Artificial Sequence: Synthetic oligonucleotide
guuaaauauauucc

SEQ ID NO: 33081 - RNA, 14 nt, Artificial Sequence
  Description of Artificial Sequence: Synthetic oligonucleotide
uguuaaauauauuc

SEQ ID NO: 33082 - RNA, 14 nt, Artificial Sequence
  Description of Artificial Sequence: Synthetic oligonucleotide
uuguuaaauauauu

SEQ ID NO: 33083 - RNA, 14 nt, Artificial Sequence
  Description of Artificial Sequence: Synthetic oligonucleotide
uuuguuaaauauau

SEQ ID NO: 33084 - RNA, 14 nt, Artificial Sequence
  Description of Artificial Sequence: Synthetic oligonucleotide
auuuguuaaauaua

SEQ ID NO: 33085 - RNA, 14 nt, Artificial Sequence
  Description of Artificial Sequence: Synthetic oligonucleotide
uauuuguuaaauau

SEQ ID NO: 33086 - RNA, 14 nt, Artificial Sequence
  Description of Artificial Sequence: Synthetic oligonucleotide
auauuuguuaaaua

SEQ ID NO: 33087 - RNA, 14 nt, Artificial Sequence
  Description of Artificial Sequence: Synthetic oligonucleotide
aauauuuguuaaau

SEQ ID NO: 33088 - RNA, 14 nt, Artificial Sequence
  Description of Artificial Sequence: Synthetic oligonucleotide
gaauauuuguuaaa

SEQ ID NO: 33089 - RNA, 14 nt, Artificial Sequence
  Description of Artificial Sequence: Synthetic oligonucleotide
agaauauuuguuaa

SEQ ID NO: 33090 - RNA, 14 nt, Artificial Sequence
  Description of Artificial Sequence: Synthetic oligonucleotide
cagaauauuuguua

SEQ ID NO: 33091 - RNA, 14 nt, Artificial Sequence
  Description of Artificial Sequence: Synthetic oligonucleotide
ucagaauauuuguu

SEQ ID NO: 33092 - RNA, 14 nt, Artificial Sequence
  Description of Artificial Sequence: Synthetic oligonucleotide
uucagaauauuugu

SEQ ID NO: 33093 - RNA, 14 nt, Artificial Sequence
  Description of Artificial Sequence: Synthetic oligonucleotide
cuucagaauauuug

SEQ ID NO: 33094 - RNA, 14 nt, Artificial Sequence
  Description of Artificial Sequence: Synthetic oligonucleotide
ucuucagaauauuu

SEQ ID NO: 33095 - RNA, 14 nt, Artificial Sequence
  Description of Artificial Sequence: Synthetic oligonucleotide
gucuucagaauauu

SEQ ID NO: 33096 - RNA, 14 nt, Artificial Sequence
  Description of Artificial Sequence: Synthetic oligonucleotide
ggucuucagaauau

SEQ ID NO: 33097 - RNA, 14 nt, Artificial Sequence
  Description of Artificial Sequence: Synthetic oligonucleotide
cggucuucagaaua

SEQ ID NO: 33098 - RNA, 14 nt, Artificial Sequence
  Description of Artificial Sequence: Synthetic oligonucleotide
ucggucuucagaau

SEQ ID NO: 33099 - RNA, 14 nt, Artificial Sequence
  Description of Artificial Sequence: Synthetic oligonucleotide
uucggucuucagaa

SEQ ID NO: 33100 - RNA, 14 nt, Artificial Sequence
  Description of Artificial Sequence: Synthetic oligonucleotide
cuucggucuucaga

SEQ ID NO: 33101 - RNA, 14 nt, Artificial Sequence
  Description of Artificial Sequence: Synthetic oligonucleotide
ucuucggucuucag

SEQ ID NO: 33102 - RNA, 14 nt, Artificial Sequence
  Description of Artificial Sequence: Synthetic oligonucleotide
uucuucggucuuca

SEQ ID NO: 33103 - RNA, 14 nt, Artificial Sequence
  Description of Artificial Sequence: Synthetic oligonucleotide
cuucuucggucuuc

SEQ ID NO: 33104 - RNA, 14 nt, Artificial Sequence
  Description of Artificial Sequence: Synthetic oligonucleotide
ccuucuucggucuu

SEQ ID NO: 33105 - RNA, 14 nt, Artificial Sequence
  Description of Artificial Sequence: Synthetic oligonucleotide
cccuucuucggucu

SEQ ID NO: 33106 - RNA, 14 nt, Artificial Sequence
  Description of Artificial Sequence: Synthetic oligonucleotide
ucccuucuucgguc

SEQ ID NO: 33107 - RNA, 14 nt, Artificial Sequence
  Description of Artificial Sequence: Synthetic oligonucleotide
uucccuucuucggu

SEQ ID NO: 33108 - RNA, 14 nt, Artificial Sequence
  Description of Artificial Sequence: Synthetic oligonucleotide
auucccuucuucgg

SEQ ID NO: 33109 - RNA, 14 nt, Artificial Sequence
  Description of Artificial Sequence: Synthetic oligonucleotide
uauucccuucuucg

SEQ ID NO: 33110 - RNA, 14 nt, Artificial Sequence
  Description of Artificial Sequence: Synthetic oligonucleotide
uuauucccuucuuc

SEQ ID NO: 33111 - RNA, 14 nt, Artificial Sequence
  Description of Artificial Sequence: Synthetic oligonucleotide
auuauucccuucuu

SEQ ID NO: 33112 - RNA, 14 nt, Artificial Sequence
  Description of Artificial Sequence: Synthetic oligonucleotide
cauuauucccuucu

SEQ ID NO: 33113 - RNA, 14 nt, Artificial Sequence
  Description of Artificial Sequence: Synthetic oligonucleotide
ucauuauucccuuc

SEQ ID NO: 33114 - RNA, 14 nt, Artificial Sequence
  Description of Artificial Sequence: Synthetic oligonucleotide
aucauuauucccuu

SEQ ID NO: 33115 - RNA, 14 nt, Artificial Sequence
  Description of Artificial Sequence: Synthetic oligonucleotide
aaucauuauucccu

SEQ ID NO: 33116 - RNA, 14 nt, Artificial Sequence
  Description of Artificial Sequence: Synthetic oligonucleotide
aaaucauuauuccc

SEQ ID NO: 33117 - RNA, 14 nt, Artificial Sequence
  Description of Artificial Sequence: Synthetic oligonucleotide
aaaaucauuauucc

SEQ ID NO: 33118 - RNA, 14 nt, Artificial Sequence
  Description of Artificial Sequence: Synthetic oligonucleotide
aaaaaucauuauuc

SEQ ID NO: 33119 - RNA, 14 nt, Artificial Sequence
  Description of Artificial Sequence: Synthetic oligonucleotide
aaaaaaucauuauu

SEQ ID NO: 33120 - RNA, 14 nt, Artificial Sequence
  Description of Artificial Sequence: Synthetic oligonucleotide
uaaaaaaucauuau

SEQ ID NO: 33121 - RNA, 14 nt, Artificial Sequence
  Description of Artificial Sequence: Synthetic oligonucleotide
uuaaaaaaucauua

SEQ ID NO: 33122 - RNA, 14 nt, Artificial Sequence
  Description of Artificial Sequence: Synthetic oligonucleotide
uuuaaaaaaucauu

SEQ ID NO: 33123 - RNA, 14 nt, Artificial Sequence
  Description of Artificial Sequence: Synthetic oligonucleotide
uuuuaaaaaaucau

SEQ ID NO: 33124 - RNA, 14 nt, Artificial Sequence
  Description of Artificial Sequence: Synthetic oligonucleotide
uuuuuaaaaaauca

SEQ ID NO: 33125 - RNA, 14 nt, Artificial Sequence
  Description of Artificial Sequence: Synthetic oligonucleotide
uuuuuuaaaaaauc

SEQ ID NO: 33126 - RNA, 14 nt, Artificial Sequence
  Description of Artificial Sequence: Synthetic oligonucleotide
cuuuuuuaaaaaau

SEQ ID NO: 33127 - RNA, 14 nt, Artificial Sequence
  Description of Artificial Sequence: Synthetic oligonucleotide
ucuuuuuuaaaaaa

SEQ ID NO: 33128 - RNA, 14 nt, Artificial Sequence
  Description of Artificial Sequence: Synthetic oligonucleotide
uucuuuuuuaaaaa

SEQ ID NO: 33129 - RNA, 14 nt, Artificial Sequence
  Description of Artificial Sequence: Synthetic oligonucleotide
uuucuuuuuuaaaa

SEQ ID NO: 33130 - RNA, 14 nt, Artificial Sequence
  Description of Artificial Sequence: Synthetic oligonucleotide
cuuucuuuuuuaaa

SEQ ID NO: 33131 - RNA, 14 nt, Artificial Sequence
  Description of Artificial Sequence: Synthetic oligonucleotide
ccuuucuuuuuuaa

SEQ ID NO: 33132 - RNA, 14 nt, Artificial Sequence
  Description of Artificial Sequence: Synthetic oligonucleotide
cccuuucuuuuuua

SEQ ID NO: 33133 - RNA, 14 nt, Artificial Sequence
  Description of Artificial Sequence: Synthetic oligonucleotide
ucccuuucuuuuuu

SEQ ID NO: 33134 - RNA, 14 nt, Artificial Sequence
  Description of Artificial Sequence: Synthetic oligonucleotide
uucccuuucuuuuu

SEQ ID NO: 33135 - RNA, 14 nt, Artificial Sequence
  Description of Artificial Sequence: Synthetic oligonucleotide
uuucccuuucuuuu

SEQ ID NO: 33136 - RNA, 14 nt, Artificial Sequence
  Description of Artificial Sequence: Synthetic oligonucleotide
cuuucccuuucuuu

SEQ ID NO: 33137 - RNA, 14 nt, Artificial Sequence
  Description of Artificial Sequence: Synthetic oligonucleotide
ucuuucccuuucuu

SEQ ID NO: 33138 - RNA, 14 nt, Artificial Sequence
  Description of Artificial Sequence: Synthetic oligonucleotide
aucuuucccuuucu

SEQ ID NO: 33139 - RNA, 14 nt, Artificial Sequence
  Description of Artificial Sequence: Synthetic oligonucleotide
aaucuuucccuuuc

SEQ ID NO: 33140 - RNA, 14 nt, Artificial Sequence
  Description of Artificial Sequence: Synthetic oligonucleotide
aaaucuuucccuuu

SEQ ID NO: 33141 - RNA, 14 nt, Artificial Sequence
  Description of Artificial Sequence: Synthetic oligonucleotide
uaaaucuuucccuu

SEQ ID NO: 33142 - RNA, 14 nt, Artificial Sequence
  Description of Artificial Sequence: Synthetic oligonucleotide
uuaaaucuuucccu

SEQ ID NO: 33143 - RNA, 14 nt, Artificial Sequence
  Description of Artificial Sequence: Synthetic oligonucleotide
auuaaaucuuuccc

SEQ ID NO: 33144 - RNA, 14 nt, Artificial Sequence
  Description of Artificial Sequence: Synthetic oligonucleotide
gauuaaaucuuucc

SEQ ID NO: 33145 - RNA, 14 nt, Artificial Sequence
  Description of Artificial Sequence: Synthetic oligonucleotide
ugauuaaaucuuuc

SEQ ID NO: 33146 - RNA, 14 nt, Artificial Sequence
  Description of Artificial Sequence: Synthetic oligonucleotide
uugauuaaaucuuu

SEQ ID NO: 33147 - RNA, 14 nt, Artificial Sequence
  Description of Artificial Sequence: Synthetic oligonucleotide
auugauuaaaucuu

SEQ ID NO: 33148 - RNA, 14 nt, Artificial Sequence
  Description of Artificial Sequence: Synthetic oligonucleotide
aauugauuaaaucu

SEQ ID NO: 33149 - RNA, 14 nt, Artificial Sequence
  Description of Artificial Sequence: Synthetic oligonucleotide
aaauugauuaaauc

SEQ ID NO: 33150 - RNA, 14 nt, Artificial Sequence
  Description of Artificial Sequence: Synthetic oligonucleotide
gaaauugauuaaau

SEQ ID NO: 33151 - RNA, 14 nt, Artificial Sequence
  Description of Artificial Sequence: Synthetic oligonucleotide
ugaaauugauuaaa

SEQ ID NO: 33152 - RNA, 14 nt, Artificial Sequence
  Description of Artificial Sequence: Synthetic oligonucleotide
cugaaauugauuaa

SEQ ID NO: 33153 - RNA, 14 nt, Artificial Sequence
  Description of Artificial Sequence: Synthetic oligonucleotide
acugaaauugauua

SEQ ID NO: 33154 - RNA, 14 nt, Artificial Sequence
  Description of Artificial Sequence: Synthetic oligonucleotide
uacugaaauugauu

SEQ ID NO: 33155 - RNA, 14 nt, Artificial Sequence
  Description of Artificial Sequence: Synthetic oligonucleotide
uuacugaaauugau

SEQ ID NO: 33156 - RNA, 14 nt, Artificial Sequence
  Description of Artificial Sequence: Synthetic oligonucleotide
cuuacugaaauuga

SEQ ID NO: 33157 - RNA, 14 nt, Artificial Sequence
  Description of Artificial Sequence: Synthetic oligonucleotide
ucuuacugaaauug

SEQ ID NO: 33158 - RNA, 14 nt, Artificial Sequence
  Description of Artificial Sequence: Synthetic oligonucleotide
cucuuacugaaauu

SEQ ID NO: 33159 - RNA, 14 nt, Artificial Sequence
  Description of Artificial Sequence: Synthetic oligonucleotide
ccucuuacugaaau

SEQ ID NO: 33160 - RNA, 14 nt, Artificial Sequence
  Description of Artificial Sequence: Synthetic oligonucleotide
uccucuuacugaaa

SEQ ID NO: 33161 - RNA, 14 nt, Artificial Sequence
  Description of Artificial Sequence: Synthetic oligonucleotide
cuccucuuacugaa

SEQ ID NO: 33162 - RNA, 14 nt, Artificial Sequence
  Description of Artificial Sequence: Synthetic oligonucleotide
ccuccucuuacuga

SEQ ID NO: 33163 - RNA, 14 nt, Artificial Sequence
  Description of Artificial Sequence: Synthetic oligonucleotide
uccuccucuuacug

SEQ ID NO: 33164 - RNA, 14 nt, Artificial Sequence
  Description of Artificial Sequence: Synthetic oligonucleotide
uuccuccucuuacu

SEQ ID NO: 33165 - RNA, 14 nt, Artificial Sequence
  Description of Artificial Sequence: Synthetic oligonucleotide
uuuccuccucuuac

SEQ ID NO: 33166 - RNA, 14 nt, Artificial Sequence
  Description of Artificial Sequence: Synthetic oligonucleotide
cuuuccuccucuua

SEQ ID NO: 33167 - RNA, 14 nt, Artificial Sequence
  Description of Artificial Sequence: Synthetic oligonucleotide
acuuuccuccucuu

SEQ ID NO: 33168 - RNA, 14 nt, Artificial Sequence
  Description of Artificial Sequence: Synthetic oligonucleotide
uacuuuccuccucu

SEQ ID NO: 33169 - RNA, 14 nt, Artificial Sequence
  Description of Artificial Sequence: Synthetic oligonucleotide
cuacuuuccuccuc

SEQ ID NO: 33170 - RNA, 14 nt, Artificial Sequence
  Description of Artificial Sequence: Synthetic oligonucleotide
gcuacuuuccuccu

SEQ ID NO: 33171 - RNA, 14 nt, Artificial Sequence
  Description of Artificial Sequence: Synthetic oligonucleotide
agcuacuuuccucc

SEQ ID NO: 33172 - RNA, 14 nt, Artificial Sequence
  Description of Artificial Sequence: Synthetic oligonucleotide
cagcuacuuuccuc

SEQ ID NO: 33173 - RNA, 14 nt, Artificial Sequence
  Description of Artificial Sequence: Synthetic oligonucleotide
ucagcuacuuuccu

SEQ ID NO: 33174 - RNA, 14 nt, Artificial Sequence
  Description of Artificial Sequence: Synthetic oligonucleotide
uucagcuacuuucc

SEQ ID NO: 33175 - RNA, 14 nt, Artificial Sequence
  Description of Artificial Sequence: Synthetic oligonucleotide
uuucagcuacuuuc

SEQ ID NO: 33176 - RNA, 14 nt, Artificial Sequence
  Description of Artificial Sequence: Synthetic oligonucleotide
auuucagcuacuuu

SEQ ID NO: 33177 - RNA, 14 nt, Artificial Sequence
  Description of Artificial Sequence: Synthetic oligonucleotide
aauuucagcuacuu

SEQ ID NO: 33178 - RNA, 14 nt, Artificial Sequence
  Description of Artificial Sequence: Synthetic oligonucleotide
uaauuucagcuacu

SEQ ID NO: 33179 - RNA, 14 nt, Artificial Sequence
  Description of Artificial Sequence: Synthetic oligonucleotide
guaauuucagcuac

SEQ ID NO: 33180 - RNA, 14 nt, Artificial Sequence
  Description of Artificial Sequence: Synthetic oligonucleotide
aguaauuucagcua

SEQ ID NO: 33181 - RNA, 14 nt, Artificial Sequence
  Description of Artificial Sequence: Synthetic oligonucleotide
caguaauuucagcu

SEQ ID NO: 33182 - RNA, 14 nt, Artificial Sequence
  Description of Artificial Sequence: Synthetic oligonucleotide
ccaguaauuucagc

SEQ ID NO: 33183 - RNA, 14 nt, Artificial Sequence
  Description of Artificial Sequence: Synthetic oligonucleotide
uccaguaauuucag

SEQ ID NO: 33184 - RNA, 14 nt, Artificial Sequence
  Description of Artificial Sequence: Synthetic oligonucleotide
cuccaguaauuuca

SEQ ID NO: 33185 - RNA, 14 nt, Artificial Sequence
  Description of Artificial Sequence: Synthetic oligonucleotide
ucuccaguaauuuc

SEQ ID NO: 33186 - RNA, 14 nt, Artificial Sequence
  Description of Artificial Sequence: Synthetic oligonucleotide
uucuccaguaauuu

SEQ ID NO: 33187 - RNA, 14 nt, Artificial Sequence
  Description of Artificial Sequence: Synthetic oligonucleotide
uuucuccaguaauu

SEQ ID NO: 33188 - RNA, 14 nt, Artificial Sequence
  Description of Artificial Sequence: Synthetic oligonucleotide
auuucuccaguaau

SEQ ID NO: 33189 - RNA, 14 nt, Artificial Sequence
  Description of Artificial Sequence: Synthetic oligonucleotide
aauuucuccaguaa

SEQ ID NO: 33190 - RNA, 14 nt, Artificial Sequence
  Description of Artificial Sequence: Synthetic oligonucleotide
gaauuucuccagua

SEQ ID NO: 33191 - RNA, 14 nt, Artificial Sequence
  Description of Artificial Sequence: Synthetic oligonucleotide
ugaauuucuccagu

SEQ ID NO: 33192 - RNA, 14 nt, Artificial Sequence
  Description of Artificial Sequence: Synthetic oligonucleotide
cugaauuucuccag

SEQ ID NO: 33193 - RNA, 14 nt, Artificial Sequence
  Description of Artificial Sequence: Synthetic oligonucleotide
gcugaauuucucca

SEQ ID NO: 33194 - RNA, 14 nt, Artificial Sequence
  Description of Artificial Sequence: Synthetic oligonucleotide
ugcugaauuucucc

SEQ ID NO: 33195 - RNA, 14 nt, Artificial Sequence
  Description of Artificial Sequence: Synthetic oligonucleotide
cugcugaauuucuc

SEQ ID NO: 33196 - RNA, 14 nt, Artificial Sequence
  Description of Artificial Sequence: Synthetic oligonucleotide
acugcugaauuucu

SEQ ID NO: 33197 - RNA, 14 nt, Artificial Sequence
  Description of Artificial Sequence: Synthetic oligonucleotide
uacugcugaauuuc

SEQ ID NO: 33198 - RNA, 14 nt, Artificial Sequence
  Description of Artificial Sequence: Synthetic oligonucleotide
auacugcugaauuu

SEQ ID NO: 33199 - RNA, 14 nt, Artificial Sequence
  Description of Artificial Sequence: Synthetic oligonucleotide
gauacugcugaauu

SEQ ID NO: 33200 - RNA, 14 nt, Artificial Sequence
  Description of Artificial Sequence: Synthetic oligonucleotide
ugauacugcugaau

SEQ ID NO: 33201 - RNA, 14 nt, Artificial Sequence
  Description of Artificial Sequence: Synthetic oligonucleotide
cugauacugcugaa

SEQ ID NO: 33202 - RNA, 14 nt, Artificial Sequence
  Description of Artificial Sequence: Synthetic oligonucleotide
ucugauacugcuga

SEQ ID NO: 33203 - RNA, 14 nt, Artificial Sequence
  Description of Artificial Sequence: Synthetic oligonucleotide
uucugauacugcug

SEQ ID NO: 33204 - RNA, 14 nt, Artificial Sequence
  Description of Artificial Sequence: Synthetic oligonucleotide
auucugauacugcu

SEQ ID NO: 33205 - RNA, 14 nt, Artificial Sequence
  Description of Artificial Sequence: Synthetic oligonucleotide
gauucugauacugc

SEQ ID NO: 33206 - RNA, 14 nt, Artificial Sequence
  Description of Artificial Sequence: Synthetic oligonucleotide
ugauucugauacug

SEQ ID NO: 33207 - RNA, 14 nt, Artificial Sequence
  Description of Artificial Sequence: Synthetic oligonucleotide
cugauucugauacu

SEQ ID NO: 33208 - RNA, 14 nt, Artificial Sequence
  Description of Artificial Sequence: Synthetic oligonucleotide
gcugauucugauac

SEQ ID NO: 33209 - RNA, 14 nt, Artificial Sequence
  Description of Artificial Sequence: Synthetic oligonucleotide
ggcugauucugaua

SEQ ID NO: 33210 - RNA, 14 nt, Artificial Sequence
  Description of Artificial Sequence: Synthetic oligonucleotide
aggcugauucugau

SEQ ID NO: 33211 - RNA, 14 nt, Artificial Sequence
  Description of Artificial Sequence: Synthetic oligonucleotide
aaggcugauucuga

SEQ ID NO: 33212 - RNA, 14 nt, Artificial Sequence
  Description of Artificial Sequence: Synthetic oligonucleotide
uaaggcugauucug

SEQ ID NO: 33213 - RNA, 14 nt, Artificial Sequence
  Description of Artificial Sequence: Synthetic oligonucleotide
guaaggcugauucu

SEQ ID NO: 33214 - RNA, 14 nt, Artificial Sequence
  Description of Artificial Sequence: Synthetic oligonucleotide
aguaaggcugauuc

SEQ ID NO: 33215 - RNA, 14 nt, Artificial Sequence
  Description of Artificial Sequence: Synthetic oligonucleotide
caguaaggcugauu

SEQ ID NO: 33216 - RNA, 14 nt, Artificial Sequence
  Description of Artificial Sequence: Synthetic oligonucleotide
acaguaaggcugau

SEQ ID NO: 33217 - RNA, 14 nt, Artificial Sequence
  Description of Artificial Sequence: Synthetic oligonucleotide
aacaguaaggcuga

SEQ ID NO: 33218 - RNA, 14 nt, Artificial Sequence
  Description of Artificial Sequence: Synthetic oligonucleotide
aaacaguaaggcug

SEQ ID NO: 33219 - RNA, 14 nt, Artificial Sequence
  Description of Artificial Sequence: Synthetic oligonucleotide
uaaacaguaaggcu

SEQ ID NO: 33220 - RNA, 14 nt, Artificial Sequence
  Description of Artificial Sequence: Synthetic oligonucleotide
guaaacaguaaggc

SEQ ID NO: 33221 - RNA, 14 nt, Artificial Sequence
  Description of Artificial Sequence: Synthetic oligonucleotide
cguaaacaguaagg

SEQ ID NO: 33222 - RNA, 14 nt, Artificial Sequence
  Description of Artificial Sequence: Synthetic oligonucleotide
ccguaaacaguaag

SEQ ID NO: 33223 - RNA, 14 nt, Artificial Sequence
  Description of Artificial Sequence: Synthetic oligonucleotide
uccguaaacaguaa

SEQ ID NO: 33224 - RNA, 14 nt, Artificial Sequence
  Description of Artificial Sequence: Synthetic oligonucleotide
auccguaaacagua

SEQ ID NO: 33225 - RNA, 14 nt, Artificial Sequence
  Description of Artificial Sequence: Synthetic oligonucleotide
uauccguaaacagu

SEQ ID NO: 33226 - RNA, 14 nt, Artificial Sequence
  Description of Artificial Sequence: Synthetic oligonucleotide
cuauccguaaacag

SEQ ID NO: 33227 - RNA, 14 nt, Artificial Sequence
  Description of Artificial Sequence: Synthetic oligonucleotide
ucuauccguaaaca

SEQ ID NO: 33228 - RNA, 14 nt, Artificial Sequence
  Description of Artificial Sequence: Synthetic oligonucleotide
uucuauccguaaac

SEQ ID NO: 33229 - RNA, 14 nt, Artificial Sequence
  Description of Artificial Sequence: Synthetic oligonucleotide
guucuauccguaaa

SEQ ID NO: 33230 - RNA, 14 nt, Artificial Sequence
  Description of Artificial Sequence: Synthetic oligonucleotide
gguucuauccguaa

SEQ ID NO: 33231 - RNA, 14 nt, Artificial Sequence
  Description of Artificial Sequence: Synthetic oligonucleotide
ugguucuauccgua

SEQ ID NO: 33232 - RNA, 14 nt, Artificial Sequence
  Description of Artificial Sequence: Synthetic oligonucleotide
cugguucuauccgu

SEQ ID NO: 33233 - RNA, 14 nt, Artificial Sequence
  Description of Artificial Sequence: Synthetic oligonucleotide
ucugguucuauccg

SEQ ID NO: 33234 - RNA, 14 nt, Artificial Sequence
  Description of Artificial Sequence: Synthetic oligonucleotide
aucugguucuaucc

SEQ ID NO: 33235 - RNA, 14 nt, Artificial Sequence
  Description of Artificial Sequence: Synthetic oligonucleotide
uaucugguucuauc

SEQ ID NO: 33236 - RNA, 14 nt, Artificial Sequence
  Description of Artificial Sequence: Synthetic oligonucleotide
auaucugguucuau

SEQ ID NO: 33237 - RNA, 14 nt, Artificial Sequence
  Description of Artificial Sequence: Synthetic oligonucleotide
cauaucugguucua

SEQ ID NO: 33238 - RNA, 14 nt, Artificial Sequence
  Description of Artificial Sequence: Synthetic oligonucleotide
ucauaucugguucu

SEQ ID NO: 33239 - RNA, 14 nt, Artificial Sequence
  Description of Artificial Sequence: Synthetic oligonucleotide
cucauaucugguuc

SEQ ID NO: 33240 - RNA, 14 nt, Artificial Sequence
  Description of Artificial Sequence: Synthetic oligonucleotide
ccucauaucugguu

SEQ ID NO: 33241 - RNA, 14 nt, Artificial Sequence
  Description of Artificial Sequence: Synthetic oligonucleotide
uccucauaucuggu

SEQ ID NO: 33242 - RNA, 14 nt, Artificial Sequence
  Description of Artificial Sequence: Synthetic oligonucleotide
cuccucauaucugg

SEQ ID NO: 33243 - RNA, 14 nt, Artificial Sequence
  Description of Artificial Sequence: Synthetic oligonucleotide
ucuccucauaucug

SEQ ID NO: 33244 - RNA, 14 nt, Artificial Sequence
  Description of Artificial Sequence: Synthetic oligonucleotide
aucuccucauaucu

SEQ ID NO: 33245 - RNA, 14 nt, Artificial Sequence
  Description of Artificial Sequence: Synthetic oligonucleotide
aaucuccucauauc

SEQ ID NO: 33246 - RNA, 14 nt, Artificial Sequence
  Description of Artificial Sequence: Synthetic oligonucleotide
gaaucuccucauau

SEQ ID NO: 33247 - RNA, 14 nt, Artificial Sequence
  Description of Artificial Sequence: Synthetic oligonucleotide
agaaucuccucaua

SEQ ID NO: 33248 - RNA, 14 nt, Artificial Sequence
  Description of Artificial Sequence: Synthetic oligonucleotide
aagaaucuccucau

SEQ ID NO: 33249 - RNA, 14 nt, Artificial Sequence
  Description of Artificial Sequence: Synthetic oligonucleotide
aaagaaucuccuca

SEQ ID NO: 33250 - RNA, 14 nt, Artificial Sequence
  Description of Artificial Sequence: Synthetic oligonucleotide
caaagaaucuccuc

SEQ ID NO: 33251 - RNA, 14 nt, Artificial Sequence
  Description of Artificial Sequence: Synthetic oligonucleotide
ucaaagaaucuccu

SEQ ID NO: 33252 - RNA, 14 nt, Artificial Sequence
  Description of Artificial Sequence: Synthetic oligonucleotide
uucaaagaaucucc

SEQ ID NO: 33253 - RNA, 14 nt, Artificial Sequence
  Description of Artificial Sequence: Synthetic oligonucleotide
uuucaaagaaucuc

SEQ ID NO: 33254 - RNA, 14 nt, Artificial Sequence
  Description of Artificial Sequence: Synthetic oligonucleotide
uuuucaaagaaucu

SEQ ID NO: 33255 - RNA, 14 nt, Artificial Sequence
  Description of Artificial Sequence: Synthetic oligonucleotide
guuuucaaagaauc

SEQ ID NO: 33256 - RNA, 14 nt, Artificial Sequence
  Description of Artificial Sequence: Synthetic oligonucleotide
gguuuucaaagaau

SEQ ID NO: 33257 - RNA, 14 nt, Artificial Sequence
  Description of Artificial Sequence: Synthetic oligonucleotide
agguuuucaaagaa

SEQ ID NO: 33258 - RNA, 14 nt, Artificial Sequence
  Description of Artificial Sequence: Synthetic oligonucleotide
aagguuuucaaaga

SEQ ID NO: 33259 - RNA, 14 nt, Artificial Sequence
  Description of Artificial Sequence: Synthetic oligonucleotide
uaagguuuucaaag

SEQ ID NO: 33260 - RNA, 14 nt, Artificial Sequence
  Description of Artificial Sequence: Synthetic oligonucleotide
uuaagguuuucaaa

SEQ ID NO: 33261 - RNA, 14 nt, Artificial Sequence
  Description of Artificial Sequence: Synthetic oligonucleotide
guuaagguuuucaa

SEQ ID NO: 33262 - RNA, 14 nt, Artificial Sequence
  Description of Artificial Sequence: Synthetic oligonucleotide
gguuaagguuuuca

SEQ ID NO: 33263 - RNA, 14 nt, Artificial Sequence
  Description of Artificial Sequence: Synthetic oligonucleotide
ggguuaagguuuuc

SEQ ID NO: 33264 - RNA, 14 nt, Artificial Sequence
  Description of Artificial Sequence: Synthetic oligonucleotide
gggguuaagguuuu

SEQ ID NO: 33265 - RNA, 14 nt, Artificial Sequence
  Description of Artificial Sequence: Synthetic oligonucleotide
ugggguuaagguuu

SEQ ID NO: 33266 - RNA, 14 nt, Artificial Sequence
  Description of Artificial Sequence: Synthetic oligonucleotide
augggguuaagguu

SEQ ID NO: 33267 - RNA, 14 nt, Artificial Sequence
  Description of Artificial Sequence: Synthetic oligonucleotide
caugggguuaaggu

SEQ ID NO: 33268 - RNA, 14 nt, Artificial Sequence
  Description of Artificial Sequence: Synthetic oligonucleotide
ccaugggguuaagg

SEQ ID NO: 33269 - RNA, 14 nt, Artificial Sequence
  Description of Artificial Sequence: Synthetic oligonucleotide
cccaugggguuaag

SEQ ID NO: 33270 - RNA, 14 nt, Artificial Sequence
  Description of Artificial Sequence: Synthetic oligonucleotide
ucccaugggguuaa

SEQ ID NO: 33271 - RNA, 14 nt, Artificial Sequence
  Description of Artificial Sequence: Synthetic oligonucleotide
uucccaugggguua

SEQ ID NO: 33272 - RNA, 14 nt, Artificial Sequence
  Description of Artificial Sequence: Synthetic oligonucleotide
cuucccaugggguu

SEQ ID NO: 33273 - RNA, 14 nt, Artificial Sequence
  Description of Artificial Sequence: Synthetic oligonucleotide
acuucccauggggu

SEQ ID NO: 33274 - RNA, 14 nt, Artificial Sequence
  Description of Artificial Sequence: Synthetic oligonucleotide
cacuucccaugggg

SEQ ID NO: 33275 - RNA, 14 nt, Artificial Sequence
  Description of Artificial Sequence: Synthetic oligonucleotide
gcacuucccauggg

SEQ ID NO: 33276 - RNA, 14 nt, Artificial Sequence
  Description of Artificial Sequence: Synthetic oligonucleotide
ugcacuucccaugg

SEQ ID NO: 33277 - RNA, 14 nt, Artificial Sequence
  Description of Artificial Sequence: Synthetic oligonucleotide
augcacuucccaug

SEQ ID NO: 33278 - RNA, 14 nt, Artificial Sequence
  Description of Artificial Sequence: Synthetic oligonucleotide
gaugcacuucccau

SEQ ID NO: 33279 - RNA, 14 nt, Artificial Sequence
  Description of Artificial Sequence: Synthetic oligonucleotide
agaugcacuuccca

SEQ ID NO: 33280 - RNA, 14 nt, Artificial Sequence
  Description of Artificial Sequence: Synthetic oligonucleotide
cagaugcacuuccc

SEQ ID NO: 33281 - RNA, 14 nt, Artificial Sequence
  Description of Artificial Sequence: Synthetic oligonucleotide
ucagaugcacuucc

SEQ ID NO: 33282 - RNA, 14 nt, Artificial Sequence
  Description of Artificial Sequence: Synthetic oligonucleotide
uucagaugcacuuc

SEQ ID NO: 33283 - RNA, 14 nt, Artificial Sequence
  Description of Artificial Sequence: Synthetic oligonucleotide
uuucagaugcacuu

SEQ ID NO: 33284 - RNA, 14 nt, Artificial Sequence
  Description of Artificial Sequence: Synthetic oligonucleotide
uuuucagaugcacu

SEQ ID NO: 33285 - RNA, 14 nt, Artificial Sequence
  Description of Artificial Sequence: Synthetic oligonucleotide
uuuuucagaugcac

SEQ ID NO: 33286 - RNA, 14 nt, Artificial Sequence
  Description of Artificial Sequence: Synthetic oligonucleotide
cuuuuucagaugca

SEQ ID NO: 33287 - RNA, 14 nt, Artificial Sequence
  Description of Artificial Sequence: Synthetic oligonucleotide
ucuuuuucagaugc

SEQ ID NO: 33288 - RNA, 14 nt, Artificial Sequence
  Description of Artificial Sequence: Synthetic oligonucleotide
cucuuuuucagaug

SEQ ID NO: 33289 - RNA, 14 nt, Artificial Sequence
  Description of Artificial Sequence: Synthetic oligonucleotide
acucuuuuucagau

SEQ ID NO: 33290 - RNA, 14 nt, Artificial Sequence
  Description of Artificial Sequence: Synthetic oligonucleotide
aacucuuuuucaga

SEQ ID NO: 33291 - RNA, 14 nt, Artificial Sequence
  Description of Artificial Sequence: Synthetic oligonucleotide
aaacucuuuuucag

SEQ ID NO: 33292 - RNA, 14 nt, Artificial Sequence
  Description of Artificial Sequence: Synthetic oligonucleotide
uaaacucuuuuuca

SEQ ID NO: 33293 - RNA, 14 nt, Artificial Sequence
  Description of Artificial Sequence: Synthetic oligonucleotide
guaaacucuuuuuc

SEQ ID NO: 33294 - RNA, 14 nt, Artificial Sequence
  Description of Artificial Sequence: Synthetic oligonucleotide
uguaaacucuuuuu

SEQ ID NO: 33295 - RNA, 14 nt, Artificial Sequence
  Description of Artificial Sequence: Synthetic oligonucleotide
cuguaaacucuuuu

SEQ ID NO: 33296 - RNA, 14 nt, Artificial Sequence
  Description of Artificial Sequence: Synthetic oligonucleotide
ucuguaaacucuuu

SEQ ID NO: 33297 - RNA, 14 nt, Artificial Sequence
  Description of Artificial Sequence: Synthetic oligonucleotide
aucuguaaacucuu

SEQ ID NO: 33298 - RNA, 14 nt, Artificial Sequence
  Description of Artificial Sequence: Synthetic oligonucleotide
aaucuguaaacucu

SEQ ID NO: 33299 - RNA, 14 nt, Artificial Sequence
  Description of Artificial Sequence: Synthetic oligonucleotide
uaaucuguaaacuc

SEQ ID NO: 33300 - RNA, 14 nt, Artificial Sequence
  Description of Artificial Sequence: Synthetic oligonucleotide
auaaucuguaaacu

SEQ ID NO: 33301 - RNA, 14 nt, Artificial Sequence
  Description of Artificial Sequence: Synthetic oligonucleotide
aauaaucuguaaac

SEQ ID NO: 33302 - RNA, 14 nt, Artificial Sequence
  Description of Artificial Sequence: Synthetic oligonucleotide
aaauaaucuguaaa

SEQ ID NO: 33303 - RNA, 14 nt, Artificial Sequence
  Description of Artificial Sequence: Synthetic oligonucleotide
caaauaaucuguaa

SEQ ID NO: 33304 - RNA, 14 nt, Artificial Sequence
  Description of Artificial Sequence: Synthetic oligonucleotide
acaaauaaucugua

SEQ ID NO: 33305 - RNA, 14 nt, Artificial Sequence
  Description of Artificial Sequence: Synthetic oligonucleotide
aacaaauaaucugu

SEQ ID NO: 33306 - RNA, 14 nt, Artificial Sequence
  Description of Artificial Sequence: Synthetic oligonucleotide
gaacaaauaaucug

SEQ ID NO: 33307 - RNA, 14 nt, Artificial Sequence
  Description of Artificial Sequence: Synthetic oligonucleotide
ugaacaaauaaucu

SEQ ID NO: 33308 - RNA, 14 nt, Artificial Sequence
  Description of Artificial Sequence: Synthetic oligonucleotide
uugaacaaauaauc

SEQ ID NO: 33309 - RNA, 14 nt, Artificial Sequence
  Description of Artificial Sequence: Synthetic oligonucleotide
guugaacaaauaau

SEQ ID NO: 33310 - RNA, 14 nt, Artificial Sequence
  Description of Artificial Sequence: Synthetic oligonucleotide
uguugaacaaauaa

SEQ ID NO: 33311 - RNA, 14 nt, Artificial Sequence
  Description of Artificial Sequence: Synthetic oligonucleotide
uuguugaacaaaua

SEQ ID NO: 33312 - RNA, 14 nt, Artificial Sequence
  Description of Artificial Sequence: Synthetic oligonucleotide
cuuguugaacaaau

SEQ ID NO: 33313 - RNA, 14 nt, Artificial Sequence
  Description of Artificial Sequence: Synthetic oligonucleotide
acuuguugaacaaa

SEQ ID NO: 33314 - RNA, 14 nt, Artificial Sequence
  Description of Artificial Sequence: Synthetic oligonucleotide
gacuuguugaacaa

SEQ ID NO: 33315 - RNA, 14 nt, Artificial Sequence
  Description of Artificial Sequence: Synthetic oligonucleotide
ugacuuguugaaca

SEQ ID NO: 33316 - RNA, 14 nt, Artificial Sequence
  Description of Artificial Sequence: Synthetic oligonucleotide
gugacuuguugaac

SEQ ID NO: 33317 - RNA, 14 nt, Artificial Sequence
  Description of Artificial Sequence: Synthetic oligonucleotide
agugacuuguugaa

SEQ ID NO: 33318 - RNA, 14 nt, Artificial Sequence
  Description of Artificial Sequence: Synthetic oligonucleotide
uagugacuuguuga

SEQ ID NO: 33319 - RNA, 14 nt, Artificial Sequence
  Description of Artificial Sequence: Synthetic oligonucleotide
cuagugacuuguug

SEQ ID NO: 33320 - RNA, 14 nt, Artificial Sequence
  Description of Artificial Sequence: Synthetic oligonucleotide
ucuagugacuuguu

SEQ ID NO: 33321 - RNA, 14 nt, Artificial Sequence
  Description of Artificial Sequence: Synthetic oligonucleotide
uucuagugacuugu

SEQ ID NO: 33322 - RNA, 14 nt, Artificial Sequence
  Description of Artificial Sequence: Synthetic oligonucleotide
uuucuagugacuug

SEQ ID NO: 33323 - RNA, 14 nt, Artificial Sequence
  Description of Artificial Sequence: Synthetic oligonucleotide
auuucuagugacuu

SEQ ID NO: 33324 - RNA, 14 nt, Artificial Sequence
  Description of Artificial Sequence: Synthetic oligonucleotide
aauuucuagugacu

SEQ ID NO: 33325 - RNA, 14 nt, Artificial Sequence
  Description of Artificial Sequence: Synthetic oligonucleotide
caauuucuagugac

SEQ ID NO: 33326 - RNA, 14 nt, Artificial Sequence
  Description of Artificial Sequence: Synthetic oligonucleotide
ucaauuucuaguga

SEQ ID NO: 33327 - RNA, 14 nt, Artificial Sequence
  Description of Artificial Sequence: Synthetic oligonucleotide
uucaauuucuagug

SEQ ID NO: 33328 - RNA, 14 nt, Artificial Sequence
  Description of Artificial Sequence: Synthetic oligonucleotide
guucaauuucuagu

SEQ ID NO: 33329 - RNA, 14 nt, Artificial Sequence
  Description of Artificial Sequence: Synthetic oligonucleotide
gguucaauuucuag

SEQ ID NO: 33330 - RNA, 14 nt, Artificial Sequence
  Description of Artificial Sequence: Synthetic oligonucleotide
agguucaauuucua

SEQ ID NO: 33331 - RNA, 14 nt, Artificial Sequence
  Description of Artificial Sequence: Synthetic oligonucleotide
gagguucaauuucu

SEQ ID NO: 33332 - RNA, 14 nt, Artificial Sequence
  Description of Artificial Sequence: Synthetic oligonucleotide
cgagguucaauuuc

SEQ ID NO: 33333 - RNA, 14 nt, Artificial Sequence
  Description of Artificial Sequence: Synthetic oligonucleotide
ucgagguucaauuu

SEQ ID NO: 33334 - RNA, 14 nt, Artificial Sequence
  Description of Artificial Sequence: Synthetic oligonucleotide
uucgagguucaauu

SEQ ID NO: 33335 - RNA, 14 nt, Artificial Sequence
  Description of Artificial Sequence: Synthetic oligonucleotide
uuucgagguucaau

SEQ ID NO: 33336 - RNA, 14 nt, Artificial Sequence
  Description of Artificial Sequence: Synthetic oligonucleotide
guuucgagguucaa

SEQ ID NO: 33337 - RNA, 14 nt, Artificial Sequence
  Description of Artificial Sequence: Synthetic oligonucleotide
aguuucgagguuca

SEQ ID NO: 33338 - RNA, 14 nt, Artificial Sequence
  Description of Artificial Sequence: Synthetic oligonucleotide
caguuucgagguuc

SEQ ID NO: 33339 - RNA, 14 nt, Artificial Sequence
  Description of Artificial Sequence: Synthetic oligonucleotide
gcaguuucgagguu

SEQ ID NO: 33340 - RNA, 14 nt, Artificial Sequence
  Description of Artificial Sequence: Synthetic oligonucleotide
ugcaguuucgaggu

SEQ ID NO: 33341 - RNA, 14 nt, Artificial Sequence
  Description of Artificial Sequence: Synthetic oligonucleotide
uugcaguuucgagg

SEQ ID NO: 33342 - RNA, 14 nt, Artificial Sequence
  Description of Artificial Sequence: Synthetic oligonucleotide
uuugcaguuucgag

SEQ ID NO: 33343 - RNA, 14 nt, Artificial Sequence
  Description of Artificial Sequence: Synthetic oligonucleotide
guuugcaguuucga

SEQ ID NO: 33344 - RNA, 14 nt, Artificial Sequence
  Description of Artificial Sequence: Synthetic oligonucleotide
uguuugcaguuucg

SEQ ID NO: 33345 - RNA, 14 nt, Artificial Sequence
  Description of Artificial Sequence: Synthetic oligonucleotide
cuguuugcaguuuc

SEQ ID NO: 33346 - RNA, 14 nt, Artificial Sequence
  Description of Artificial Sequence: Synthetic oligonucleotide
gcuguuugcaguuu

SEQ ID NO: 33347 - RNA, 14 nt, Artificial Sequence
  Description of Artificial Sequence: Synthetic oligonucleotide
ggcuguuugcaguu

SEQ ID NO: 33348 - RNA, 14 nt, Artificial Sequence
  Description of Artificial Sequence: Synthetic oligonucleotide
uggcuguuugcagu

SEQ ID NO: 33349 - RNA, 14 nt, Artificial Sequence
  Description of Artificial Sequence: Synthetic oligonucleotide
guggcuguuugcag

SEQ ID NO: 33350 - RNA, 14 nt, Artificial Sequence
  Description of Artificial Sequence: Synthetic oligonucleotide
gguggcuguuugca

SEQ ID NO: 33351 - RNA, 14 nt, Artificial Sequence
  Description of Artificial Sequence: Synthetic oligonucleotide
agguggcuguuugc

SEQ ID NO: 33352 - RNA, 14 nt, Artificial Sequence
  Description of Artificial Sequence: Synthetic oligonucleotide
gagguggcuguuug

SEQ ID NO: 33353 - RNA, 14 nt, Artificial Sequence
  Description of Artificial Sequence: Synthetic oligonucleotide
cgagguggcuguuu

SEQ ID NO: 33354 - RNA, 14 nt, Artificial Sequence
  Description of Artificial Sequence: Synthetic oligonucleotide
ucgagguggcuguu

SEQ ID NO: 33355 - RNA, 14 nt, Artificial Sequence
  Description of Artificial Sequence: Synthetic oligonucleotide
aucgagguggcugu

SEQ ID NO: 33356 - RNA, 14 nt, Artificial Sequence
  Description of Artificial Sequence: Synthetic oligonucleotide
aaucgagguggcug

SEQ ID NO: 33357 - RNA, 14 nt, Artificial Sequence
  Description of Artificial Sequence: Synthetic oligonucleotide
aaaucgagguggcu

SEQ ID NO: 33358 - RNA, 14 nt, Artificial Sequence
  Description of Artificial Sequence: Synthetic oligonucleotide
gaaaucgagguggc

SEQ ID NO: 33359 - RNA, 14 nt, Artificial Sequence
  Description of Artificial Sequence: Synthetic oligonucleotide
ggaaaucgaggugg

SEQ ID NO: 33360 - RNA, 14 nt, Artificial Sequence
  Description of Artificial Sequence: Synthetic oligonucleotide
aggaaaucgaggug

SEQ ID NO: 33361 - RNA, 14 nt, Artificial Sequence
  Description of Artificial Sequence: Synthetic oligonucleotide
uaggaaaucgaggu

SEQ ID NO: 33362 - RNA, 14 nt, Artificial Sequence
  Description of Artificial Sequence: Synthetic oligonucleotide
cuaggaaaucgagg

SEQ ID NO: 33363 - RNA, 14 nt, Artificial Sequence
  Description of Artificial Sequence: Synthetic oligonucleotide
ccuaggaaaucgag

SEQ ID NO: 33364 - RNA, 14 nt, Artificial Sequence
  Description of Artificial Sequence: Synthetic oligonucleotide
uccuaggaaaucga

SEQ ID NO: 33365 - RNA, 14 nt, Artificial Sequence
  Description of Artificial Sequence: Synthetic oligonucleotide
uuccuaggaaaucg

SEQ ID NO: 33366 - RNA, 14 nt, Artificial Sequence
  Description of Artificial Sequence: Synthetic oligonucleotide
uuuccuaggaaauc

SEQ ID NO: 33367 - RNA, 14 nt, Artificial Sequence
  Description of Artificial Sequence: Synthetic oligonucleotide
auuuccuaggaaau

SEQ ID NO: 33368 - RNA, 14 nt, Artificial Sequence
  Description of Artificial Sequence: Synthetic oligonucleotide
gauuuccuaggaaa

SEQ ID NO: 33369 - RNA, 14 nt, Artificial Sequence
  Description of Artificial Sequence: Synthetic oligonucleotide
ugauuuccuaggaa

SEQ ID NO: 33370 - RNA, 14 nt, Artificial Sequence
  Description of Artificial Sequence: Synthetic oligonucleotide
uugauuuccuagga

SEQ ID NO: 33371 - RNA, 14 nt, Artificial Sequence
  Description of Artificial Sequence: Synthetic oligonucleotide
guugauuuccuagg

SEQ ID NO: 33372 - RNA, 14 nt, Artificial Sequence
  Description of Artificial Sequence: Synthetic oligonucleotide
aguugauuuccuag

SEQ ID NO: 33373 - RNA, 14 nt, Artificial Sequence
  Description of Artificial Sequence: Synthetic oligonucleotide
aaguugauuuccua

SEQ ID NO: 33374 - RNA, 14 nt, Artificial Sequence
  Description of Artificial Sequence: Synthetic oligonucleotide
aaaguugauuuccu

SEQ ID NO: 33375 - RNA, 14 nt, Artificial Sequence
  Description of Artificial Sequence: Synthetic oligonucleotide
aaaaguugauuucc

SEQ ID NO: 33376 - RNA, 14 nt, Artificial Sequence
  Description of Artificial Sequence: Synthetic oligonucleotide
aaaaaguugauuuc

SEQ ID NO: 33377 - RNA, 14 nt, Artificial Sequence
  Description of Artificial Sequence: Synthetic oligonucleotide
gaaaaaguugauuu

SEQ ID NO: 33378 - RNA, 14 nt, Artificial Sequence
  Description of Artificial Sequence: Synthetic oligonucleotide
ggaaaaaguugauu

SEQ ID NO: 33379 - RNA, 14 nt, Artificial Sequence
  Description of Artificial Sequence: Synthetic oligonucleotide
aggaaaaaguugau

SEQ ID NO: 33380 - RNA, 14 nt, Artificial Sequence
  Description of Artificial Sequence: Synthetic oligonucleotide
aaggaaaaaguuga

SEQ ID NO: 33381 - RNA, 14 nt, Artificial Sequence
  Description of Artificial Sequence: Synthetic oligonucleotide
uaaggaaaaaguug

SEQ ID NO: 33382 - RNA, 14 nt, Artificial Sequence
  Description of Artificial Sequence: Synthetic oligonucleotide
uuaaggaaaaaguu

SEQ ID NO: 33383 - RNA, 14 nt, Artificial Sequence
  Description of Artificial Sequence: Synthetic oligonucleotide
uuuaaggaaaaagu

SEQ ID NO: 33384 - RNA, 14 nt, Artificial Sequence
  Description of Artificial Sequence: Synthetic oligonucleotide
uuuuaaggaaaaag

SEQ ID NO: 33385 - RNA, 14 nt, Artificial Sequence
  Description of Artificial Sequence: Synthetic oligonucleotide
auuuuaaggaaaaa

SEQ ID NO: 33386 - RNA, 14 nt, Artificial Sequence
  Description of Artificial Sequence: Synthetic oligonucleotide
gauuuuaaggaaaa

SEQ ID NO: 33387 - RNA, 14 nt, Artificial Sequence
  Description of Artificial Sequence: Synthetic oligonucleotide
agauuuuaaggaaa

SEQ ID NO: 33388 - RNA, 14 nt, Artificial Sequence
  Description of Artificial Sequence: Synthetic oligonucleotide
gagauuuuaaggaa

SEQ ID NO: 33389 - RNA, 14 nt, Artificial Sequence
  Description of Artificial Sequence: Synthetic oligonucleotide
ggagauuuuaagga

SEQ ID NO: 33390 - RNA, 14 nt, Artificial Sequence
  Description of Artificial Sequence: Synthetic oligonucleotide
aggagauuuuaagg

SEQ ID NO: 33391 - RNA, 14 nt, Artificial Sequence
  Description of Artificial Sequence: Synthetic oligonucleotide
caggagauuuuaag

SEQ ID NO: 33392 - RNA, 14 nt, Artificial Sequence
  Description of Artificial Sequence: Synthetic oligonucleotide
ccaggagauuuuaa

SEQ ID NO: 33393 - RNA, 14 nt, Artificial Sequence
  Description of Artificial Sequence: Synthetic oligonucleotide
uccaggagauuuua

SEQ ID NO: 33394 - RNA, 14 nt, Artificial Sequence
  Description of Artificial Sequence: Synthetic oligonucleotide
uuccaggagauuuu

SEQ ID NO: 33395 - RNA, 14 nt, Artificial Sequence
  Description of Artificial Sequence: Synthetic oligonucleotide
auuccaggagauuu

SEQ ID NO: 33396 - RNA, 14 nt, Artificial Sequence
  Description of Artificial Sequence: Synthetic oligonucleotide
uauuccaggagauu

SEQ ID NO: 33397 - RNA, 14 nt, Artificial Sequence
  Description of Artificial Sequence: Synthetic oligonucleotide
uuauuccaggagau

SEQ ID NO: 33398 - RNA, 14 nt, Artificial Sequence
  Description of Artificial Sequence: Synthetic oligonucleotide
cuuauuccaggaga

SEQ ID NO: 33399 - RNA, 14 nt, Artificial Sequence
  Description of Artificial Sequence: Synthetic oligonucleotide
ccuuauuccaggag

SEQ ID NO: 33400 - RNA, 14 nt, Artificial Sequence
  Description of Artificial Sequence: Synthetic oligonucleotide
gccuuauuccagga

SEQ ID NO: 33401 - RNA, 14 nt, Artificial Sequence
  Description of Artificial Sequence: Synthetic oligonucleotide
ggccuuauuccagg

SEQ ID NO: 33402 - RNA, 14 nt, Artificial Sequence
  Description of Artificial Sequence: Synthetic oligonucleotide
aggccuuauuccag

SEQ ID NO: 33403 - RNA, 14 nt, Artificial Sequence
  Description of Artificial Sequence: Synthetic oligonucleotide
uaggccuuauucca

SEQ ID NO: 33404 - RNA, 14 nt, Artificial Sequence
  Description of Artificial Sequence: Synthetic oligonucleotide
uuaggccuuauucc

SEQ ID NO: 33405 - RNA, 14 nt, Artificial Sequence
  Description of Artificial Sequence: Synthetic oligonucleotide
guuaggccuuauuc

SEQ ID NO: 33406 - RNA, 14 nt, Artificial Sequence
  Description of Artificial Sequence: Synthetic oligonucleotide
uguuaggccuuauu

SEQ ID NO: 33407 - RNA, 14 nt, Artificial Sequence
  Description of Artificial Sequence: Synthetic oligonucleotide
guguuaggccuuau

SEQ ID NO: 33408 - RNA, 14 nt, Artificial Sequence
  Description of Artificial Sequence: Synthetic oligonucleotide
uguguuaggccuua

SEQ ID NO: 33409 - RNA, 14 nt, Artificial Sequence
  Description of Artificial Sequence: Synthetic oligonucleotide
cuguguuaggccuu

SEQ ID NO: 33410 - RNA, 14 nt, Artificial Sequence
  Description of Artificial Sequence: Synthetic oligonucleotide
ccuguguuaggccu

SEQ ID NO: 33411 - RNA, 14 nt, Artificial Sequence
  Description of Artificial Sequence: Synthetic oligonucleotide
gccuguguuaggcc

SEQ ID NO: 33412 - RNA, 14 nt, Artificial Sequence
  Description of Artificial Sequence: Synthetic oligonucleotide
ggccuguguuaggc

SEQ ID NO: 33413 - RNA, 14 nt, Artificial Sequence
  Description of Artificial Sequence: Synthetic oligonucleotide
cggccuguguuagg

SEQ ID NO: 33414 - RNA, 14 nt, Artificial Sequence
  Description of Artificial Sequence: Synthetic oligonucleotide
ucggccuguguuag

SEQ ID NO: 33415 - RNA, 14 nt, Artificial Sequence
  Description of Artificial Sequence: Synthetic oligonucleotide
gucggccuguguua

SEQ ID NO: 33416 - RNA, 14 nt, Artificial Sequence
  Description of Artificial Sequence: Synthetic oligonucleotide
ugucggccuguguu

SEQ ID NO: 33417 - RNA, 14 nt, Artificial Sequence
  Description of Artificial Sequence: Synthetic oligonucleotide
augucggccugugu

SEQ ID NO: 33418 - RNA, 14 nt, Artificial Sequence
  Description of Artificial Sequence: Synthetic oligonucleotide
caugucggccugug

SEQ ID NO: 33419 - RNA, 14 nt, Artificial Sequence
  Description of Artificial Sequence: Synthetic oligonucleotide
ccaugucggccugu

SEQ ID NO: 33420 - RNA, 14 nt, Artificial Sequence
  Description of Artificial Sequence: Synthetic oligonucleotide
gccaugucggccug

SEQ ID NO: 33421 - RNA, 14 nt, Artificial Sequence
  Description of Artificial Sequence: Synthetic oligonucleotide
agccaugucggccu

SEQ ID NO: 33422 - RNA, 14 nt, Artificial Sequence
  Description of Artificial Sequence: Synthetic oligonucleotide
gagccaugucggcc

SEQ ID NO: 33423 - RNA, 14 nt, Artificial Sequence
  Description of Artificial Sequence: Synthetic oligonucleotide
agagccaugucggc

SEQ ID NO: 33424 - RNA, 14 nt, Artificial Sequence
  Description of Artificial Sequence: Synthetic oligonucleotide
uagagccaugucgg

SEQ ID NO: 33425 - RNA, 14 nt, Artificial Sequence
  Description of Artificial Sequence: Synthetic oligonucleotide
guagagccaugucg

SEQ ID NO: 33426 - RNA, 14 nt, Artificial Sequence
  Description of Artificial Sequence: Synthetic oligonucleotide
gguagagccauguc

SEQ ID NO: 33427 - RNA, 14 nt, Artificial Sequence
  Description of Artificial Sequence: Synthetic oligonucleotide
agguagagccaugu

SEQ ID NO: 33428 - RNA, 14 nt, Artificial Sequence
  Description of Artificial Sequence: Synthetic oligonucleotide
gagguagagccaug

SEQ ID NO: 33429 - RNA, 14 nt, Artificial Sequence
  Description of Artificial Sequence: Synthetic oligonucleotide
ugagguagagccau

SEQ ID NO: 33430 - RNA, 14 nt, Artificial Sequence
  Description of Artificial Sequence: Synthetic oligonucleotide
cugagguagagcca

SEQ ID NO: 33431 - RNA, 14 nt, Artificial Sequence
  Description of Artificial Sequence: Synthetic oligonucleotide
ccugagguagagcc

SEQ ID NO: 33432 - RNA, 14 nt, Artificial Sequence
  Description of Artificial Sequence: Synthetic oligonucleotide
accugagguagagc

SEQ ID NO: 33433 - RNA, 14 nt, Artificial Sequence
  Description of Artificial Sequence: Synthetic oligonucleotide
uaccugagguagag

SEQ ID NO: 33434 - RNA, 14 nt, Artificial Sequence
  Description of Artificial Sequence: Synthetic oligonucleotide
guaccugagguaga

SEQ ID NO: 33435 - RNA, 14 nt, Artificial Sequence
  Description of Artificial Sequence: Synthetic oligonucleotide
aguaccugagguag

SEQ ID NO: 33436 - RNA, 14 nt, Artificial Sequence
  Description of Artificial Sequence: Synthetic oligonucleotide
aaguaccugaggua

SEQ ID NO: 33437 - RNA, 14 nt, Artificial Sequence
  Description of Artificial Sequence: Synthetic oligonucleotide
aaaguaccugaggu

SEQ ID NO: 33438 - RNA, 14 nt, Artificial Sequence
  Description of Artificial Sequence: Synthetic oligonucleotide
uaaaguaccugagg

SEQ ID NO: 33439 - RNA, 14 nt, Artificial Sequence
  Description of Artificial Sequence: Synthetic oligonucleotide
guaaaguaccugag

SEQ ID NO: 33440 - RNA, 14 nt, Artificial Sequence
  Description of Artificial Sequence: Synthetic oligonucleotide
cguaaaguaccuga

SEQ ID NO: 33441 - RNA, 14 nt, Artificial Sequence
  Description of Artificial Sequence: Synthetic oligonucleotide
ucguaaaguaccug

SEQ ID NO: 33442 - RNA, 14 nt, Artificial Sequence
  Description of Artificial Sequence: Synthetic oligonucleotide
cucguaaaguaccu

SEQ ID NO: 33443 - RNA, 14 nt, Artificial Sequence
  Description of Artificial Sequence: Synthetic oligonucleotide
ccucguaaaguacc

SEQ ID NO: 33444 - RNA, 14 nt, Artificial Sequence
  Description of Artificial Sequence: Synthetic oligonucleotide
accucguaaaguac

SEQ ID NO: 33445 - RNA, 14 nt, Artificial Sequence
  Description of Artificial Sequence: Synthetic oligonucleotide
gaccucguaaagua

SEQ ID NO: 33446 - RNA, 14 nt, Artificial Sequence
  Description of Artificial Sequence: Synthetic oligonucleotide
ugaccucguaaagu

SEQ ID NO: 33447 - RNA, 14 nt, Artificial Sequence
  Description of Artificial Sequence: Synthetic oligonucleotide
gugaccucguaaag

SEQ ID NO: 33448 - RNA, 14 nt, Artificial Sequence
  Description of Artificial Sequence: Synthetic oligonucleotide
ggugaccucguaaa

SEQ ID NO: 33449 - RNA, 14 nt, Artificial Sequence
  Description of Artificial Sequence: Synthetic oligonucleotide
gggugaccucguaa

SEQ ID NO: 33450 - RNA, 14 nt, Artificial Sequence
  Description of Artificial Sequence: Synthetic oligonucleotide
ugggugaccucgua

SEQ ID NO: 33451 - RNA, 14 nt, Artificial Sequence
  Description of Artificial Sequence: Synthetic oligonucleotide
uugggugaccucgu

SEQ ID NO: 33452 - RNA, 14 nt, Artificial Sequence
  Description of Artificial Sequence: Synthetic oligonucleotide
guugggugaccucg

SEQ ID NO: 33453 - RNA, 14 nt, Artificial Sequence
  Description of Artificial Sequence: Synthetic oligonucleotide
uguugggugaccuc

SEQ ID NO: 33454 - RNA, 14 nt, Artificial Sequence
  Description of Artificial Sequence: Synthetic oligonucleotide
guguugggugaccu

SEQ ID NO: 33455 - RNA, 14 nt, Artificial Sequence
  Description of Artificial Sequence: Synthetic oligonucleotide
gguguugggugacc

SEQ ID NO: 33456 - RNA, 14 nt, Artificial Sequence
  Description of Artificial Sequence: Synthetic oligonucleotide
ugguguugggugac

SEQ ID NO: 33457 - RNA, 14 nt, Artificial Sequence
  Description of Artificial Sequence: Synthetic oligonucleotide
augguguuggguga

SEQ ID NO: 33458 - RNA, 14 nt, Artificial Sequence
  Description of Artificial Sequence: Synthetic oligonucleotide
aaugguguugggug

SEQ ID NO: 33459 - RNA, 14 nt, Artificial Sequence
  Description of Artificial Sequence: Synthetic oligonucleotide
uaaugguguugggu

SEQ ID NO: 33460 - RNA, 14 nt, Artificial Sequence
  Description of Artificial Sequence: Synthetic oligonucleotide
cuaaugguguuggg

SEQ ID NO: 33461 - RNA, 14 nt, Artificial Sequence
  Description of Artificial Sequence: Synthetic oligonucleotide
ucuaaugguguugg

SEQ ID NO: 33462 - RNA, 14 nt, Artificial Sequence
  Description of Artificial Sequence: Synthetic oligonucleotide
uucuaaugguguug

SEQ ID NO: 33463 - RNA, 14 nt, Artificial Sequence
  Description of Artificial Sequence: Synthetic oligonucleotide
uuucuaaugguguu

SEQ ID NO: 33464 - RNA, 14 nt, Artificial Sequence
  Description of Artificial Sequence: Synthetic oligonucleotide
cuuucuaauggugu

SEQ ID NO: 33465 - RNA, 14 nt, Artificial Sequence
  Description of Artificial Sequence: Synthetic oligonucleotide
ucuuucuaauggug

SEQ ID NO: 33466 - RNA, 14 nt, Artificial Sequence
  Description of Artificial Sequence: Synthetic oligonucleotide
cucuuucuaauggu

SEQ ID NO: 33467 - RNA, 14 nt, Artificial Sequence
  Description of Artificial Sequence: Synthetic oligonucleotide
ucucuuucuaaugg

SEQ ID NO: 33468 - RNA, 14 nt, Artificial Sequence
  Description of Artificial Sequence: Synthetic oligonucleotide
uucucuuucuaaug

SEQ ID NO: 33469 - RNA, 14 nt, Artificial Sequence
  Description of Artificial Sequence: Synthetic oligonucleotide
guucucuuucuaau

SEQ ID NO: 33470 - RNA, 14 nt, Artificial Sequence
  Description of Artificial Sequence: Synthetic oligonucleotide
gguucucuuucuaa

SEQ ID NO: 33471 - RNA, 14 nt, Artificial Sequence
  Description of Artificial Sequence: Synthetic oligonucleotide
ugguucucuuucua

SEQ ID NO: 33472 - RNA, 14 nt, Artificial Sequence
  Description of Artificial Sequence: Synthetic oligonucleotide
augguucucuuucu

SEQ ID NO: 33473 - RNA, 14 nt, Artificial Sequence
  Description of Artificial Sequence: Synthetic oligonucleotide
caugguucucuuuc

SEQ ID NO: 33474 - RNA, 14 nt, Artificial Sequence
  Description of Artificial Sequence: Synthetic oligonucleotide
acaugguucucuuu

SEQ ID NO: 33475 - RNA, 14 nt, Artificial Sequence
  Description of Artificial Sequence: Synthetic oligonucleotide
uacaugguucucuu

SEQ ID NO: 33476 - RNA, 14 nt, Artificial Sequence
  Description of Artificial Sequence: Synthetic oligonucleotide
uuacaugguucucu

SEQ ID NO: 33477 - RNA, 14 nt, Artificial Sequence
  Description of Artificial Sequence: Synthetic oligonucleotide
uuuacaugguucuc

SEQ ID NO: 33478 - RNA, 14 nt, Artificial Sequence
  Description of Artificial Sequence: Synthetic oligonucleotide
uuuuacaugguucu

SEQ ID NO: 33479 - RNA, 14 nt, Artificial Sequence
  Description of Artificial Sequence: Synthetic oligonucleotide
auuuuacaugguuc

SEQ ID NO: 33480 - RNA, 14 nt, Artificial Sequence
  Description of Artificial Sequence: Synthetic oligonucleotide
uauuuuacaugguu

SEQ ID NO: 33481 - RNA, 14 nt, Artificial Sequence
  Description of Artificial Sequence: Synthetic oligonucleotide
uuauuuuacauggu

SEQ ID NO: 33482 - RNA, 14 nt, Artificial Sequence
  Description of Artificial Sequence: Synthetic oligonucleotide
cuuauuuuacaugg

SEQ ID NO: 33483 - RNA, 14 nt, Artificial Sequence
  Description of Artificial Sequence: Synthetic oligonucleotide
gcuuauuuuacaug

SEQ ID NO: 33484 - RNA, 14 nt, Artificial Sequence
  Description of Artificial Sequence: Synthetic oligonucleotide
agcuuauuuuacau

SEQ ID NO: 33485 - RNA, 14 nt, Artificial Sequence
  Description of Artificial Sequence: Synthetic oligonucleotide
aagcuuauuuuaca

SEQ ID NO: 33486 - RNA, 14 nt, Artificial Sequence
  Description of Artificial Sequence: Synthetic oligonucleotide
aaagcuuauuuuac

SEQ ID NO: 33487 - RNA, 14 nt, Artificial Sequence
  Description of Artificial Sequence: Synthetic oligonucleotide
uaaagcuuauuuua

SEQ ID NO: 33488 - RNA, 14 nt, Artificial Sequence
  Description of Artificial Sequence: Synthetic oligonucleotide
cuaaagcuuauuuu

SEQ ID NO: 33489 - RNA, 14 nt, Artificial Sequence
  Description of Artificial Sequence: Synthetic oligonucleotide
acuaaagcuuauuu

SEQ ID NO: 33490 - RNA, 14 nt, Artificial Sequence
  Description of Artificial Sequence: Synthetic oligonucleotide
gacuaaagcuuauu

SEQ ID NO: 33491 - RNA, 14 nt, Artificial Sequence
  Description of Artificial Sequence: Synthetic oligonucleotide
cgacuaaagcuuau

SEQ ID NO: 33492 - RNA, 14 nt, Artificial Sequence
  Description of Artificial Sequence: Synthetic oligonucleotide
ccgacuaaagcuua

SEQ ID NO: 33493 - RNA, 14 nt, Artificial Sequence
  Description of Artificial Sequence: Synthetic oligonucleotide
uccgacuaaagcuu

SEQ ID NO: 33494 - RNA, 14 nt, Artificial Sequence
  Description of Artificial Sequence: Synthetic oligonucleotide
auccgacuaaagcu

SEQ ID NO: 33495 - RNA, 14 nt, Artificial Sequence
  Description of Artificial Sequence: Synthetic oligonucleotide
aauccgacuaaagc

SEQ ID NO: 33496 - RNA, 14 nt, Artificial Sequence
  Description of Artificial Sequence: Synthetic oligonucleotide
caauccgacuaaag

SEQ ID NO: 33497 - RNA, 14 nt, Artificial Sequence
  Description of Artificial Sequence: Synthetic oligonucleotide
gcaauccgacuaaa

SEQ ID NO: 33498 - RNA, 14 nt, Artificial Sequence
  Description of Artificial Sequence: Synthetic oligonucleotide
agcaauccgacuaa

SEQ ID NO: 33499 - RNA, 14 nt, Artificial Sequence
  Description of Artificial Sequence: Synthetic oligonucleotide
cagcaauccgacua

SEQ ID NO: 33500 - RNA, 14 nt, Artificial Sequence
  Description of Artificial Sequence: Synthetic oligonucleotide
ucagcaauccgacu

SEQ ID NO: 33501 - RNA, 14 nt, Artificial Sequence
  Description of Artificial Sequence: Synthetic oligonucleotide
uucagcaauccgac

SEQ ID NO: 33502 - RNA, 14 nt, Artificial Sequence
  Description of Artificial Sequence: Synthetic oligonucleotide
uuucagcaauccga

SEQ ID NO: 33503 - RNA, 14 nt, Artificial Sequence
  Description of Artificial Sequence: Synthetic oligonucleotide
guuucagcaauccg

SEQ ID NO: 33504 - RNA, 14 nt, Artificial Sequence
  Description of Artificial Sequence: Synthetic oligonucleotide
aguuucagcaaucc

SEQ ID NO: 33505 - RNA, 14 nt, Artificial Sequence
  Description of Artificial Sequence: Synthetic oligonucleotide
caguuucagcaauc

SEQ ID NO: 33506 - RNA, 14 nt, Artificial Sequence
  Description of Artificial Sequence: Synthetic oligonucleotide
ucaguuucagcaau

SEQ ID NO: 33507 - RNA, 14 nt, Artificial Sequence
  Description of Artificial Sequence: Synthetic oligonucleotide
cucaguuucagcaa

SEQ ID NO: 33508 - RNA, 14 nt, Artificial Sequence
  Description of Artificial Sequence: Synthetic oligonucleotide
gcucaguuucagca

SEQ ID NO: 33509 - RNA, 14 nt, Artificial Sequence
  Description of Artificial Sequence: Synthetic oligonucleotide
agcucaguuucagc

SEQ ID NO: 33510 - RNA, 14 nt, Artificial Sequence
  Description of Artificial Sequence: Synthetic oligonucleotide
cagcucaguuucag

SEQ ID NO: 33511 - RNA, 14 nt, Artificial Sequence
  Description of Artificial Sequence: Synthetic oligonucleotide
ccagcucaguuuca

SEQ ID NO: 33512 - RNA, 14 nt, Artificial Sequence
  Description of Artificial Sequence: Synthetic oligonucleotide
uccagcucaguuuc

SEQ ID NO: 33513 - RNA, 14 nt, Artificial Sequence
  Description of Artificial Sequence: Synthetic oligonucleotide
uuccagcucaguuu

SEQ ID NO: 33514 - RNA, 14 nt, Artificial Sequence
  Description of Artificial Sequence: Synthetic oligonucleotide
auuccagcucaguu

SEQ ID NO: 33515 - RNA, 14 nt, Artificial Sequence
  Description of Artificial Sequence: Synthetic oligonucleotide
gauuccagcucagu

SEQ ID NO: 33516 - RNA, 14 nt, Artificial Sequence
  Description of Artificial Sequence: Synthetic oligonucleotide
ugauuccagcucag

SEQ ID NO: 33517 - RNA, 14 nt, Artificial Sequence
  Description of Artificial Sequence: Synthetic oligonucleotide
uugauuccagcuca

SEQ ID NO: 33518 - RNA, 14 nt, Artificial Sequence
  Description of Artificial Sequence: Synthetic oligonucleotide
guugauuccagcuc

SEQ ID NO: 33519 - RNA, 14 nt, Artificial Sequence
  Description of Artificial Sequence: Synthetic oligonucleotide
uguugauuccagcu

SEQ ID NO: 33520 - RNA, 14 nt, Artificial Sequence
  Description of Artificial Sequence: Synthetic oligonucleotide
cuguugauuccagc

SEQ ID NO: 33521 - RNA, 14 nt, Artificial Sequence
  Description of Artificial Sequence: Synthetic oligonucleotide
acuguugauuccag

SEQ ID NO: 33522 - RNA, 14 nt, Artificial Sequence
  Description of Artificial Sequence: Synthetic oligonucleotide
cacuguugauucca

SEQ ID NO: 33523 - RNA, 14 nt, Artificial Sequence
  Description of Artificial Sequence: Synthetic oligonucleotide
acacuguugauucc

SEQ ID NO: 33524 - RNA, 14 nt, Artificial Sequence
  Description of Artificial Sequence: Synthetic oligonucleotide
gacacuguugauuc

SEQ ID NO: 33525 - RNA, 14 nt, Artificial Sequence
  Description of Artificial Sequence: Synthetic oligonucleotide
ugacacuguugauu

SEQ ID NO: 33526 - RNA, 14 nt, Artificial Sequence
  Description of Artificial Sequence: Synthetic oligonucleotide
cugacacuguugau

SEQ ID NO: 33527 - RNA, 14 nt, Artificial Sequence
  Description of Artificial Sequence: Synthetic oligonucleotide
gcugacacuguuga

SEQ ID NO: 33528 - RNA, 14 nt, Artificial Sequence
  Description of Artificial Sequence: Synthetic oligonucleotide
ugcugacacuguug

SEQ ID NO: 33529 - RNA, 14 nt, Artificial Sequence
  Description of Artificial Sequence: Synthetic oligonucleotide
gugcugacacuguu

SEQ ID NO: 33530 - RNA, 14 nt, Artificial Sequence
  Description of Artificial Sequence: Synthetic oligonucleotide
ggugcugacacugu

SEQ ID NO: 33531 - RNA, 14 nt, Artificial Sequence
  Description of Artificial Sequence: Synthetic oligonucleotide
uggugcugacacug

SEQ ID NO: 33532 - RNA, 14 nt, Artificial Sequence
  Description of Artificial Sequence: Synthetic oligonucleotide
uuggugcugacacu

SEQ ID NO: 33533 - RNA, 14 nt, Artificial Sequence
  Description of Artificial Sequence: Synthetic oligonucleotide
guuggugcugacac

SEQ ID NO: 33534 - RNA, 14 nt, Artificial Sequence
  Description of Artificial Sequence: Synthetic oligonucleotide
gguuggugcugaca

SEQ ID NO: 33535 - RNA, 14 nt, Artificial Sequence
  Description of Artificial Sequence: Synthetic oligonucleotide
agguuggugcugac

SEQ ID NO: 33536 - RNA, 14 nt, Artificial Sequence
  Description of Artificial Sequence: Synthetic oligonucleotide
gagguuggugcuga

SEQ ID NO: 33537 - RNA, 14 nt, Artificial Sequence
  Description of Artificial Sequence: Synthetic oligonucleotide
agagguuggugcug

SEQ ID NO: 33538 - RNA, 14 nt, Artificial Sequence
  Description of Artificial Sequence: Synthetic oligonucleotide
gagagguuggugcu

SEQ ID NO: 33539 - RNA, 14 nt, Artificial Sequence
  Description of Artificial Sequence: Synthetic oligonucleotide
ggagagguuggugc

SEQ ID NO: 33540 - RNA, 14 nt, Artificial Sequence
  Description of Artificial Sequence: Synthetic oligonucleotide
uggagagguuggug

SEQ ID NO: 33541 - RNA, 14 nt, Artificial Sequence
  Description of Artificial Sequence: Synthetic oligonucleotide
uuggagagguuggu

SEQ ID NO: 33542 - RNA, 14 nt, Artificial Sequence
  Description of Artificial Sequence: Synthetic oligonucleotide
uuuggagagguugg

SEQ ID NO: 33543 - RNA, 14 nt, Artificial Sequence
  Description of Artificial Sequence: Synthetic oligonucleotide
auuuggagagguug

SEQ ID NO: 33544 - RNA, 14 nt, Artificial Sequence
  Description of Artificial Sequence: Synthetic oligonucleotide
uauuuggagagguu

SEQ ID NO: 33545 - RNA, 14 nt, Artificial Sequence
  Description of Artificial Sequence: Synthetic oligonucleotide
guauuuggagaggu

SEQ ID NO: 33546 - RNA, 14 nt, Artificial Sequence
  Description of Artificial Sequence: Synthetic oligonucleotide
uguauuuggagagg

SEQ ID NO: 33547 - RNA, 14 nt, Artificial Sequence
  Description of Artificial Sequence: Synthetic oligonucleotide
guguauuuggagag

SEQ ID NO: 33548 - RNA, 14 nt, Artificial Sequence
  Description of Artificial Sequence: Synthetic oligonucleotide
gguguauuuggaga

SEQ ID NO: 33549 - RNA, 14 nt, Artificial Sequence
  Description of Artificial Sequence: Synthetic oligonucleotide
ugguguauuuggag

SEQ ID NO: 33550 - RNA, 14 nt, Artificial Sequence
  Description of Artificial Sequence: Synthetic oligonucleotide
augguguauuugga

SEQ ID NO: 33551 - RNA, 14 nt, Artificial Sequence
  Description of Artificial Sequence: Synthetic oligonucleotide
gaugguguauuugg

SEQ ID NO: 33552 - RNA, 14 nt, Artificial Sequence
  Description of Artificial Sequence: Synthetic oligonucleotide
agaugguguauuug

SEQ ID NO: 33553 - RNA, 14 nt, Artificial Sequence
  Description of Artificial Sequence: Synthetic oligonucleotide
uagaugguguauuu

SEQ ID NO: 33554 - RNA, 14 nt, Artificial Sequence
  Description of Artificial Sequence: Synthetic oligonucleotide
guagaugguguauu

SEQ ID NO: 33555 - RNA, 14 nt, Artificial Sequence
  Description of Artificial Sequence: Synthetic oligonucleotide
aguagaugguguau

SEQ ID NO: 33556 - RNA, 14 nt, Artificial Sequence
  Description of Artificial Sequence: Synthetic oligonucleotide
gaguagauggugua

SEQ ID NO: 33557 - RNA, 14 nt, Artificial Sequence
  Description of Artificial Sequence: Synthetic oligonucleotide
ggaguagauggugu

SEQ ID NO: 33558 - RNA, 14 nt, Artificial Sequence
  Description of Artificial Sequence: Synthetic oligonucleotide
uggaguagauggug

SEQ ID NO: 33559 - RNA, 14 nt, Artificial Sequence
  Description of Artificial Sequence: Synthetic oligonucleotide
guggaguagauggu

SEQ ID NO: 33560 - RNA, 14 nt, Artificial Sequence
  Description of Artificial Sequence: Synthetic oligonucleotide
gguggaguagaugg

SEQ ID NO: 33561 - RNA, 14 nt, Artificial Sequence
  Description of Artificial Sequence: Synthetic oligonucleotide
ugguggaguagaug

SEQ ID NO: 33562 - RNA, 14 nt, Artificial Sequence
  Description of Artificial Sequence: Synthetic oligonucleotide
cugguggaguagau

SEQ ID NO: 33563 - RNA, 14 nt, Artificial Sequence
  Description of Artificial Sequence: Synthetic oligonucleotide
acugguggaguaga

SEQ ID NO: 33564 - RNA, 14 nt, Artificial Sequence
  Description of Artificial Sequence: Synthetic oligonucleotide
uacugguggaguag

SEQ ID NO: 33565 - RNA, 14 nt, Artificial Sequence
  Description of Artificial Sequence: Synthetic oligonucleotide
auacugguggagua

SEQ ID NO: 33566 - RNA, 14 nt, Artificial Sequence
  Description of Artificial Sequence: Synthetic oligonucleotide
gauacugguggagu

SEQ ID NO: 33567 - RNA, 14 nt, Artificial Sequence
  Description of Artificial Sequence: Synthetic oligonucleotide
agauacugguggag

SEQ ID NO: 33568 - RNA, 14 nt, Artificial Sequence
  Description of Artificial Sequence: Synthetic oligonucleotide
cagauacuggugga

SEQ ID NO: 33569 - RNA, 14 nt, Artificial Sequence
  Description of Artificial Sequence: Synthetic oligonucleotide
gcagauacuggugg

SEQ ID NO: 33570 - RNA, 14 nt, Artificial Sequence
  Description of Artificial Sequence: Synthetic oligonucleotide
agcagauacuggug

SEQ ID NO: 33571 - RNA, 14 nt, Artificial Sequence
  Description of Artificial Sequence: Synthetic oligonucleotide
aagcagauacuggu

SEQ ID NO: 33572 - RNA, 14 nt, Artificial Sequence
  Description of Artificial Sequence: Synthetic oligonucleotide
gaagcagauacugg

SEQ ID NO: 33573 - RNA, 14 nt, Artificial Sequence
  Description of Artificial Sequence: Synthetic oligonucleotide
agaagcagauacug

SEQ ID NO: 33574 - RNA, 14 nt, Artificial Sequence
  Description of Artificial Sequence: Synthetic oligonucleotide
aagaagcagauacu

SEQ ID NO: 33575 - RNA, 14 nt, Artificial Sequence
  Description of Artificial Sequence: Synthetic oligonucleotide
gaagaagcagauac

SEQ ID NO: 33576 - RNA, 14 nt, Artificial Sequence
  Description of Artificial Sequence: Synthetic oligonucleotide
ugaagaagcagaua

SEQ ID NO: 33577 - RNA, 14 nt, Artificial Sequence
  Description of Artificial Sequence: Synthetic oligonucleotide
cugaagaagcagau

SEQ ID NO: 33578 - RNA, 14 nt, Artificial Sequence
  Description of Artificial Sequence: Synthetic oligonucleotide
ucugaagaagcaga

SEQ ID NO: 33579 - RNA, 14 nt, Artificial Sequence
  Description of Artificial Sequence: Synthetic oligonucleotide
gucugaagaagcag

SEQ ID NO: 33580 - RNA, 14 nt, Artificial Sequence
  Description of Artificial Sequence: Synthetic oligonucleotide
ggucugaagaagca

SEQ ID NO: 33581 - RNA, 14 nt, Artificial Sequence
  Description of Artificial Sequence: Synthetic oligonucleotide
aggucugaagaagc

SEQ ID NO: 33582 - RNA, 14 nt, Artificial Sequence
  Description of Artificial Sequence: Synthetic oligonucleotide
aaggucugaagaag

SEQ ID NO: 33583 - RNA, 14 nt, Artificial Sequence
  Description of Artificial Sequence: Synthetic oligonucleotide
uaaggucugaagaa

SEQ ID NO: 33584 - RNA, 14 nt, Artificial Sequence
  Description of Artificial Sequence: Synthetic oligonucleotide
cuaaggucugaaga

SEQ ID NO: 33585 - RNA, 14 nt, Artificial Sequence
  Description of Artificial Sequence: Synthetic oligonucleotide
acuaaggucugaag

SEQ ID NO: 33586 - RNA, 14 nt, Artificial Sequence
  Description of Artificial Sequence: Synthetic oligonucleotide
cacuaaggucugaa

SEQ ID NO: 33587 - RNA, 14 nt, Artificial Sequence
  Description of Artificial Sequence: Synthetic oligonucleotide
acacuaaggucuga

SEQ ID NO: 33588 - RNA, 14 nt, Artificial Sequence
  Description of Artificial Sequence: Synthetic oligonucleotide
uacacuaaggucug

SEQ ID NO: 33589 - RNA, 14 nt, Artificial Sequence
  Description of Artificial Sequence: Synthetic oligonucleotide
auacacuaaggucu

SEQ ID NO: 33590 - RNA, 14 nt, Artificial Sequence
  Description of Artificial Sequence: Synthetic oligonucleotide
aauacacuaagguc

SEQ ID NO: 33591 - RNA, 14 nt, Artificial Sequence
  Description of Artificial Sequence: Synthetic oligonucleotide
aaauacacuaaggu

SEQ ID NO: 33592 - RNA, 14 nt, Artificial Sequence
  Description of Artificial Sequence: Synthetic oligonucleotide
aaaauacacuaagg

SEQ ID NO: 33593 - RNA, 14 nt, Artificial Sequence
  Description of Artificial Sequence: Synthetic oligonucleotide
aaaaauacacuaag

SEQ ID NO: 33594 - RNA, 14 nt, Artificial Sequence
  Description of Artificial Sequence: Synthetic oligonucleotide
uaaaaauacacuaa

SEQ ID NO: 33595 - RNA, 14 nt, Artificial Sequence
  Description of Artificial Sequence: Synthetic oligonucleotide
cuaaaaauacacua

SEQ ID NO: 33596 - RNA, 14 nt, Artificial Sequence
  Description of Artificial Sequence: Synthetic oligonucleotide
ucuaaaaauacacu

SEQ ID NO: 33597 - RNA, 14 nt, Artificial Sequence
  Description of Artificial Sequence: Synthetic oligonucleotide
aucuaaaaauacac

SEQ ID NO: 33598 - RNA, 14 nt, Artificial Sequence
  Description of Artificial Sequence: Synthetic oligonucleotide
caucuaaaaauaca

SEQ ID NO: 33599 - RNA, 14 nt, Artificial Sequence
  Description of Artificial Sequence: Synthetic oligonucleotide
acaucuaaaaauac

SEQ ID NO: 33600 - RNA, 14 nt, Artificial Sequence
  Description of Artificial Sequence: Synthetic oligonucleotide
cacaucuaaaaaua

SEQ ID NO: 33601 - RNA, 14 nt, Artificial Sequence
  Description of Artificial Sequence: Synthetic oligonucleotide
ccacaucuaaaaau

SEQ ID NO: 33602 - RNA, 14 nt, Artificial Sequence
  Description of Artificial Sequence: Synthetic oligonucleotide
uccacaucuaaaaa

SEQ ID NO: 33603 - RNA, 14 nt, Artificial Sequence
  Description of Artificial Sequence: Synthetic oligonucleotide
auccacaucuaaaa

SEQ ID NO: 33604 - RNA, 14 nt, Artificial Sequence
  Description of Artificial Sequence: Synthetic oligonucleotide
gauccacaucuaaa

SEQ ID NO: 33605 - RNA, 14 nt, Artificial Sequence
  Description of Artificial Sequence: Synthetic oligonucleotide
agauccacaucuaa

SEQ ID NO: 33606 - RNA, 14 nt, Artificial Sequence
  Description of Artificial Sequence: Synthetic oligonucleotide
gagauccacaucua

SEQ ID NO: 33607 - RNA, 14 nt, Artificial Sequence
  Description of Artificial Sequence: Synthetic oligonucleotide
ugagauccacaucu

SEQ ID NO: 33608 - RNA, 14 nt, Artificial Sequence
  Description of Artificial Sequence: Synthetic oligonucleotide
uugagauccacauc

SEQ ID NO: 33609 - RNA, 14 nt, Artificial Sequence
  Description of Artificial Sequence: Synthetic oligonucleotide
guugagauccacau

SEQ ID NO: 33610 - RNA, 14 nt, Artificial Sequence
  Description of Artificial Sequence: Synthetic oligonucleotide
uguugagauccaca

SEQ ID NO: 33611 - RNA, 14 nt, Artificial Sequence
  Description of Artificial Sequence: Synthetic oligonucleotide
cuguugagauccac

SEQ ID NO: 33612 - RNA, 14 nt, Artificial Sequence
  Description of Artificial Sequence: Synthetic oligonucleotide
gcuguugagaucca

SEQ ID NO: 33613 - RNA, 14 nt, Artificial Sequence
  Description of Artificial Sequence: Synthetic oligonucleotide
agcuguugagaucc

SEQ ID NO: 33614 - RNA, 14 nt, Artificial Sequence
  Description of Artificial Sequence: Synthetic oligonucleotide
gagcuguugagauc

SEQ ID NO: 33615 - RNA, 14 nt, Artificial Sequence
  Description of Artificial Sequence: Synthetic oligonucleotide
ggagcuguugagau

SEQ ID NO: 33616 - RNA, 14 nt, Artificial Sequence
  Description of Artificial Sequence: Synthetic oligonucleotide
aggagcuguugaga

SEQ ID NO: 33617 - RNA, 14 nt, Artificial Sequence
  Description of Artificial Sequence: Synthetic oligonucleotide
caggagcuguugag

SEQ ID NO: 33618 - RNA, 14 nt, Artificial Sequence
  Description of Artificial Sequence: Synthetic oligonucleotide
acaggagcuguuga

SEQ ID NO: 33619 - RNA, 14 nt, Artificial Sequence
  Description of Artificial Sequence: Synthetic oligonucleotide
cacaggagcuguug

SEQ ID NO: 33620 - RNA, 14 nt, Artificial Sequence
  Description of Artificial Sequence: Synthetic oligonucleotide
ccacaggagcuguu

SEQ ID NO: 33621 - RNA, 14 nt, Artificial Sequence
  Description of Artificial Sequence: Synthetic oligonucleotide
gccacaggagcugu

SEQ ID NO: 33622 - RNA, 14 nt, Artificial Sequence
  Description of Artificial Sequence: Synthetic oligonucleotide
ugccacaggagcug

SEQ ID NO: 33623 - RNA, 14 nt, Artificial Sequence
  Description of Artificial Sequence: Synthetic oligonucleotide
cugccacaggagcu

SEQ ID NO: 33624 - RNA, 14 nt, Artificial Sequence
  Description of Artificial Sequence: Synthetic oligonucleotide
gcugccacaggagc

SEQ ID NO: 33625 - RNA, 14 nt, Artificial Sequence
  Description of Artificial Sequence: Synthetic oligonucleotide
ugcugccacaggag

SEQ ID NO: 33626 - RNA, 14 nt, Artificial Sequence
  Description of Artificial Sequence: Synthetic oligonucleotide
uugcugccacagga

SEQ ID NO: 33627 - RNA, 14 nt, Artificial Sequence
  Description of Artificial Sequence: Synthetic oligonucleotide
auugcugccacagg

SEQ ID NO: 33628 - RNA, 14 nt, Artificial Sequence
  Description of Artificial Sequence: Synthetic oligonucleotide
uauugcugccacag

SEQ ID NO: 33629 - RNA, 14 nt, Artificial Sequence
  Description of Artificial Sequence: Synthetic oligonucleotide
cuauugcugccaca

SEQ ID NO: 33630 - RNA, 14 nt, Artificial Sequence
  Description of Artificial Sequence: Synthetic oligonucleotide
gcuauugcugccac

SEQ ID NO: 33631 - RNA, 14 nt, Artificial Sequence
  Description of Artificial Sequence: Synthetic oligonucleotide
ugcuauugcugcca

SEQ ID NO: 33632 - RNA, 14 nt, Artificial Sequence
  Description of Artificial Sequence: Synthetic oligonucleotide
augcuauugcugcc

SEQ ID NO: 33633 - RNA, 14 nt, Artificial Sequence
  Description of Artificial Sequence: Synthetic oligonucleotide
gaugcuauugcugc

SEQ ID NO: 33634 - RNA, 14 nt, Artificial Sequence
  Description of Artificial Sequence: Synthetic oligonucleotide
agaugcuauugcug

SEQ ID NO: 33635 - RNA, 14 nt, Artificial Sequence
  Description of Artificial Sequence: Synthetic oligonucleotide
aagaugcuauugcu

SEQ ID NO: 33636 - RNA, 14 nt, Artificial Sequence
  Description of Artificial Sequence: Synthetic oligonucleotide
aaagaugcuauugc

SEQ ID NO: 33637 - RNA, 14 nt, Artificial Sequence
  Description of Artificial Sequence: Synthetic oligonucleotide
caaagaugcuauug

SEQ ID NO: 33638 - RNA, 14 nt, Artificial Sequence
  Description of Artificial Sequence: Synthetic oligonucleotide
gcaaagaugcuauu

SEQ ID NO: 33639 - RNA, 14 nt, Artificial Sequence
  Description of Artificial Sequence: Synthetic oligonucleotide
agcaaagaugcuau

SEQ ID NO: 33640 - RNA, 14 nt, Artificial Sequence
  Description of Artificial Sequence: Synthetic oligonucleotide
gagcaaagaugcua

SEQ ID NO: 33641 - RNA, 14 nt, Artificial Sequence
  Description of Artificial Sequence: Synthetic oligonucleotide
ggagcaaagaugcu

SEQ ID NO: 33642 - RNA, 14 nt, Artificial Sequence
  Description of Artificial Sequence: Synthetic oligonucleotide
uggagcaaagaugc

SEQ ID NO: 33643 - RNA, 14 nt, Artificial Sequence
  Description of Artificial Sequence: Synthetic oligonucleotide
cuggagcaaagaug

SEQ ID NO: 33644 - RNA, 14 nt, Artificial Sequence
  Description of Artificial Sequence: Synthetic oligonucleotide
acuggagcaaagau

SEQ ID NO: 33645 - RNA, 14 nt, Artificial Sequence
  Description of Artificial Sequence: Synthetic oligonucleotide
cacuggagcaaaga

SEQ ID NO: 33646 - RNA, 14 nt, Artificial Sequence
  Description of Artificial Sequence: Synthetic oligonucleotide
gcacuggagcaaag

SEQ ID NO: 33647 - RNA, 14 nt, Artificial Sequence
  Description of Artificial Sequence: Synthetic oligonucleotide
agcacuggagcaaa

SEQ ID NO: 33648 - RNA, 14 nt, Artificial Sequence
  Description of Artificial Sequence: Synthetic oligonucleotide
aagcacuggagcaa

SEQ ID NO: 33649 - RNA, 14 nt, Artificial Sequence
  Description of Artificial Sequence: Synthetic oligonucleotide
aaagcacuggagca

SEQ ID NO: 33650 - RNA, 14 nt, Artificial Sequence
  Description of Artificial Sequence: Synthetic oligonucleotide
aaaagcacuggagc

SEQ ID NO: 33651 - RNA, 14 nt, Artificial Sequence
  Description of Artificial Sequence: Synthetic oligonucleotide
caaaagcacuggag

SEQ ID NO: 33652 - RNA, 14 nt, Artificial Sequence
  Description of Artificial Sequence: Synthetic oligonucleotide
gcaaaagcacugga

SEQ ID NO: 33653 - RNA, 14 nt, Artificial Sequence
  Description of Artificial Sequence: Synthetic oligonucleotide
ggcaaaagcacugg

SEQ ID NO: 33654 - RNA, 14 nt, Artificial Sequence
  Description of Artificial Sequence: Synthetic oligonucleotide
uggcaaaagcacug

SEQ ID NO: 33655 - RNA, 14 nt, Artificial Sequence
  Description of Artificial Sequence: Synthetic oligonucleotide
guggcaaaagcacu

SEQ ID NO: 33656 - RNA, 14 nt, Artificial Sequence
  Description of Artificial Sequence: Synthetic oligonucleotide
uguggcaaaagcac

SEQ ID NO: 33657 - RNA, 14 nt, Artificial Sequence
  Description of Artificial Sequence: Synthetic oligonucleotide
auguggcaaaagca

SEQ ID NO: 33658 - RNA, 14 nt, Artificial Sequence
  Description of Artificial Sequence: Synthetic oligonucleotide
aauguggcaaaagc

SEQ ID NO: 33659 - RNA, 14 nt, Artificial Sequence
  Description of Artificial Sequence: Synthetic oligonucleotide
gaauguggcaaaag

SEQ ID NO: 33660 - RNA, 14 nt, Artificial Sequence
  Description of Artificial Sequence: Synthetic oligonucleotide
ugaauguggcaaaa

SEQ ID NO: 33661 - RNA, 14 nt, Artificial Sequence
  Description of Artificial Sequence: Synthetic oligonucleotide
uugaauguggcaaa

SEQ ID NO: 33662 - RNA, 14 nt, Artificial Sequence
  Description of Artificial Sequence: Synthetic oligonucleotide
uuugaauguggcaa

SEQ ID NO: 33663 - RNA, 14 nt, Artificial Sequence
  Description of Artificial Sequence: Synthetic oligonucleotide
cuuugaauguggca

SEQ ID NO: 33664 - RNA, 14 nt, Artificial Sequence
  Description of Artificial Sequence: Synthetic oligonucleotide
acuuugaauguggc

SEQ ID NO: 33665 - RNA, 14 nt, Artificial Sequence
  Description of Artificial Sequence: Synthetic oligonucleotide
gacuuugaaugugg

SEQ ID NO: 33666 - RNA, 14 nt, Artificial Sequence
  Description of Artificial Sequence: Synthetic oligonucleotide
agacuuugaaugug

SEQ ID NO: 33667 - RNA, 14 nt, Artificial Sequence
  Description of Artificial Sequence: Synthetic oligonucleotide
aagacuuugaaugu

SEQ ID NO: 33668 - RNA, 14 nt, Artificial Sequence
  Description of Artificial Sequence: Synthetic oligonucleotide
aaagacuuugaaug

SEQ ID NO: 33669 - RNA, 14 nt, Artificial Sequence
  Description of Artificial Sequence: Synthetic oligonucleotide
gaaagacuuugaau

SEQ ID NO: 33670 - RNA, 14 nt, Artificial Sequence
  Description of Artificial Sequence: Synthetic oligonucleotide
agaaagacuuugaa

SEQ ID NO: 33671 - RNA, 14 nt, Artificial Sequence
  Description of Artificial Sequence: Synthetic oligonucleotide
aagaaagacuuuga

SEQ ID NO: 33672 - RNA, 14 nt, Artificial Sequence
  Description of Artificial Sequence: Synthetic oligonucleotide
aaagaaagacuuug

SEQ ID NO: 33673 - RNA, 14 nt, Artificial Sequence
  Description of Artificial Sequence: Synthetic oligonucleotide
uaaagaaagacuuu

SEQ ID NO: 33674 - RNA, 14 nt, Artificial Sequence
  Description of Artificial Sequence: Synthetic oligonucleotide
cuaaagaaagacuu

SEQ ID NO: 33675 - RNA, 14 nt, Artificial Sequence
  Description of Artificial Sequence: Synthetic oligonucleotide
acuaaagaaagacu

SEQ ID NO: 33676 - RNA, 14 nt, Artificial Sequence
  Description of Artificial Sequence: Synthetic oligonucleotide
aacuaaagaaagac

SEQ ID NO: 33677 - RNA, 14 nt, Artificial Sequence
  Description of Artificial Sequence: Synthetic oligonucleotide
gaacuaaagaaaga

SEQ ID NO: 33678 - RNA, 14 nt, Artificial Sequence
  Description of Artificial Sequence: Synthetic oligonucleotide
ugaacuaaagaaag

SEQ ID NO: 33679 - RNA, 14 nt, Artificial Sequence
  Description of Artificial Sequence: Synthetic oligonucleotide
augaacuaaagaaa

SEQ ID NO: 33680 - RNA, 14 nt, Artificial Sequence
  Description of Artificial Sequence: Synthetic oligonucleotide
caugaacuaaagaa

SEQ ID NO: 33681 - RNA, 14 nt, Artificial Sequence
  Description of Artificial Sequence: Synthetic oligonucleotide
acaugaacuaaaga

SEQ ID NO: 33682 - RNA, 14 nt, Artificial Sequence
  Description of Artificial Sequence: Synthetic oligonucleotide
cacaugaacuaaag

SEQ ID NO: 33683 - RNA, 14 nt, Artificial Sequence
  Description of Artificial Sequence: Synthetic oligonucleotide
ccacaugaacuaaa

SEQ ID NO: 33684 - RNA, 14 nt, Artificial Sequence
  Description of Artificial Sequence: Synthetic oligonucleotide
accacaugaacuaa

SEQ ID NO: 33685 - RNA, 14 nt, Artificial Sequence
  Description of Artificial Sequence: Synthetic oligonucleotide
uaccacaugaacua

SEQ ID NO: 33686 - RNA, 14 nt, Artificial Sequence
  Description of Artificial Sequence: Synthetic oligonucleotide
cuaccacaugaacu

SEQ ID NO: 33687 - RNA, 14 nt, Artificial Sequence
  Description of Artificial Sequence: Synthetic oligonucleotide
acuaccacaugaac

SEQ ID NO: 33688 - RNA, 14 nt, Artificial Sequence
  Description of Artificial Sequence: Synthetic oligonucleotide
aacuaccacaugaa

SEQ ID NO: 33689 - RNA, 14 nt, Artificial Sequence
  Description of Artificial Sequence: Synthetic oligonucleotide
aaacuaccacauga

SEQ ID NO: 33690 - RNA, 14 nt, Artificial Sequence
  Description of Artificial Sequence: Synthetic oligonucleotide
uaaacuaccacaug

SEQ ID NO: 33691 - RNA, 14 nt, Artificial Sequence
  Description of Artificial Sequence: Synthetic oligonucleotide
guaaacuaccacau

SEQ ID NO: 33692 - RNA, 14 nt, Artificial Sequence
  Description of Artificial Sequence: Synthetic oligonucleotide
uguaaacuaccaca

SEQ ID NO: 33693 - RNA, 14 nt, Artificial Sequence
  Description of Artificial Sequence: Synthetic oligonucleotide
auguaaacuaccac

SEQ ID NO: 33694 - RNA, 14 nt, Artificial Sequence
  Description of Artificial Sequence: Synthetic oligonucleotide
uauguaaacuacca

SEQ ID NO: 33695 - RNA, 14 nt, Artificial Sequence
  Description of Artificial Sequence: Synthetic oligonucleotide
uuauguaaacuacc

SEQ ID NO: 33696 - RNA, 14 nt, Artificial Sequence
  Description of Artificial Sequence: Synthetic oligonucleotide
uuuauguaaacuac

SEQ ID NO: 33697 - RNA, 14 nt, Artificial Sequence
  Description of Artificial Sequence: Synthetic oligonucleotide
guuuauguaaacua

SEQ ID NO: 33698 - RNA, 14 nt, Artificial Sequence
  Description of Artificial Sequence: Synthetic oligonucleotide
aguuuauguaaacu

SEQ ID NO: 33699 - RNA, 14 nt, Artificial Sequence
  Description of Artificial Sequence: Synthetic oligonucleotide
uaguuuauguaaac

SEQ ID NO: 33700 - RNA, 14 nt, Artificial Sequence
  Description of Artificial Sequence: Synthetic oligonucleotide
uuaguuuauguaaa

SEQ ID NO: 33701 - RNA, 14 nt, Artificial Sequence
  Description of Artificial Sequence: Synthetic oligonucleotide
cuuaguuuauguaa

SEQ ID NO: 33702 - RNA, 14 nt, Artificial Sequence
  Description of Artificial Sequence: Synthetic oligonucleotide
acuuaguuuaugua

SEQ ID NO: 33703 - RNA, 14 nt, Artificial Sequence
  Description of Artificial Sequence: Synthetic oligonucleotide
cacuuaguuuaugu

SEQ ID NO: 33704 - RNA, 14 nt, Artificial Sequence
  Description of Artificial Sequence: Synthetic oligonucleotide
ucacuuaguuuaug

SEQ ID NO: 33705 - RNA, 14 nt, Artificial Sequence
  Description of Artificial Sequence: Synthetic oligonucleotide
uucacuuaguuuau

SEQ ID NO: 33706 - RNA, 14 nt, Artificial Sequence
  Description of Artificial Sequence: Synthetic oligonucleotide
cuucacuuaguuua

SEQ ID NO: 33707 - RNA, 14 nt, Artificial Sequence
  Description of Artificial Sequence: Synthetic oligonucleotide
ucuucacuuaguuu

SEQ ID NO: 33708 - RNA, 14 nt, Artificial Sequence
  Description of Artificial Sequence: Synthetic oligonucleotide
cucuucacuuaguu

SEQ ID NO: 33709 - RNA, 14 nt, Artificial Sequence
  Description of Artificial Sequence: Synthetic oligonucleotide
gcucuucacuuagu

SEQ ID NO: 33710 - RNA, 14 nt, Artificial Sequence
  Description of Artificial Sequence: Synthetic oligonucleotide
ggcucuucacuuag

SEQ ID NO: 33711 - RNA, 14 nt, Artificial Sequence
  Description of Artificial Sequence: Synthetic oligonucleotide
gggcucuucacuua

SEQ ID NO: 33712 - RNA, 14 nt, Artificial Sequence
  Description of Artificial Sequence: Synthetic oligonucleotide
ggggcucuucacuu

SEQ ID NO: 33713 - RNA, 14 nt, Artificial Sequence
  Description of Artificial Sequence: Synthetic oligonucleotide
aggggcucuucacu

SEQ ID NO: 33714 - RNA, 14 nt, Artificial Sequence
  Description of Artificial Sequence: Synthetic oligonucleotide
caggggcucuucac

SEQ ID NO: 33715 - RNA, 14 nt, Artificial Sequence
  Description of Artificial Sequence: Synthetic oligonucleotide
ucaggggcucuuca

SEQ ID NO: 33716 - RNA, 14 nt, Artificial Sequence
  Description of Artificial Sequence: Synthetic oligonucleotide
aucaggggcucuuc

SEQ ID NO: 33717 - RNA, 14 nt, Artificial Sequence
  Description of Artificial Sequence: Synthetic oligonucleotide
aaucaggggcucuu

SEQ ID NO: 33718 - RNA, 14 nt, Artificial Sequence
  Description of Artificial Sequence: Synthetic oligonucleotide
gaaucaggggcucu

SEQ ID NO: 33719 - RNA, 14 nt, Artificial Sequence
  Description of Artificial Sequence: Synthetic oligonucleotide
ggaaucaggggcuc

SEQ ID NO: 33720 - RNA, 14 nt, Artificial Sequence
  Description of Artificial Sequence: Synthetic oligonucleotide
aggaaucaggggcu

SEQ ID NO: 33721 - RNA, 14 nt, Artificial Sequence
  Description of Artificial Sequence: Synthetic oligonucleotide
gaggaaucaggggc

SEQ ID NO: 33722 - RNA, 14 nt, Artificial Sequence
  Description of Artificial Sequence: Synthetic oligonucleotide
ggaggaaucagggg

SEQ ID NO: 33723 - RNA, 14 nt, Artificial Sequence
  Description of Artificial Sequence: Synthetic oligonucleotide
aggaggaaucaggg

SEQ ID NO: 33724 - RNA, 14 nt, Artificial Sequence
  Description of Artificial Sequence: Synthetic oligonucleotide
gaggaggaaucagg

SEQ ID NO: 33725 - RNA, 14 nt, Artificial Sequence
  Description of Artificial Sequence: Synthetic oligonucleotide
ggaggaggaaucag

SEQ ID NO: 33726 - RNA, 14 nt, Artificial Sequence
  Description of Artificial Sequence: Synthetic oligonucleotide
aggaggaggaauca

SEQ ID NO: 33727 - RNA, 14 nt, Artificial Sequence
  Description of Artificial Sequence: Synthetic oligonucleotide
gaggaggaggaauc

SEQ ID NO: 33728 - RNA, 14 nt, Artificial Sequence
  Description of Artificial Sequence: Synthetic oligonucleotide
agaggaggaggaau

SEQ ID NO: 33729 - DNA, 14 bp, Artificial Sequence
  Description of Artificial Sequence: Synthetic oligonucleotide
aagaggaggaggaa

SEQ ID NO: 33730 - DNA, 14 bp, Artificial Sequence
  Description of Artificial Sequence: Synthetic oligonucleotide
gaagaggaggagga

SEQ ID NO: 33731 - DNA, 14 bp, Artificial Sequence
  Description of Artificial Sequence: Synthetic oligonucleotide
ggaagaggaggagg

SEQ ID NO: 33732 - DNA, 14 bp, Artificial Sequence
  Description of Artificial Sequence: Synthetic oligonucleotide
aggaagaggaggag

SEQ ID NO: 33733 - DNA, 14 bp, Artificial Sequence
  Description of Artificial Sequence: Synthetic oligonucleotide
gaggaagaggagga

SEQ ID NO: 33734 - DNA, 14 bp, Artificial Sequence
  Description of Artificial Sequence: Synthetic oligonucleotide
ggaggaagaggagg

SEQ ID NO: 33735 - DNA, 14 bp, Artificial Sequence
  Description of Artificial Sequence: Synthetic oligonucleotide
aggaggaagaggag

SEQ ID NO: 33736 - DNA, 14 bp, Artificial Sequence
  Description of Artificial Sequence: Synthetic oligonucleotide
gaggaggaagagga

SEQ ID NO: 33737 - DNA, 14 bp, Artificial Sequence
  Description of Artificial Sequence: Synthetic oligonucleotide
cgaggaggaagagg

SEQ ID NO: 33738 - RNA, 14 nt, Artificial Sequence
  Description of Artificial Sequence: Synthetic oligonucleotide
ucgaggaggaagag

SEQ ID NO: 33739 - RNA, 14 nt, Artificial Sequence
  Description of Artificial Sequence: Synthetic oligonucleotide
uucgaggaggaaga

SEQ ID NO: 33740 - RNA, 14 nt, Artificial Sequence
  Description of Artificial Sequence: Synthetic oligonucleotide
uuucgaggaggaag

SEQ ID NO: 33741 - RNA, 14 nt, Artificial Sequence
  Description of Artificial Sequence: Synthetic oligonucleotide
uuuucgaggaggaa

SEQ ID NO: 33742 - RNA, 14 nt, Artificial Sequence
  Description of Artificial Sequence: Synthetic oligonucleotide
uuuuucgaggagga

SEQ ID NO: 33743 - RNA, 14 nt, Artificial Sequence
  Description of Artificial Sequence: Synthetic oligonucleotide
uuuuuucgaggagg

SEQ ID NO: 33744 - RNA, 14 nt, Artificial Sequence
  Description of Artificial Sequence: Synthetic oligonucleotide
cuuuuuucgaggag

SEQ ID NO: 33745 - RNA, 14 nt, Artificial Sequence
  Description of Artificial Sequence: Synthetic oligonucleotide
acuuuuuucgagga

SEQ ID NO: 33746 - RNA, 14 nt, Artificial Sequence
  Description of Artificial Sequence: Synthetic oligonucleotide
aacuuuuuucgagg

SEQ ID NO: 33747 - RNA, 14 nt, Artificial Sequence
  Description of Artificial Sequence: Synthetic oligonucleotide
aaacuuuuuucgag

SEQ ID NO: 33748 - RNA, 14 nt, Artificial Sequence
  Description of Artificial Sequence: Synthetic oligonucleotide
caaacuuuuuucga

SEQ ID NO: 33749 - RNA, 14 nt, Artificial Sequence
  Description of Artificial Sequence: Synthetic oligonucleotide
ucaaacuuuuuucg

SEQ ID NO: 33750 - RNA, 14 nt, Artificial Sequence
  Description of Artificial Sequence: Synthetic oligonucleotide
aucaaacuuuuuuc

SEQ ID NO: 33751 - RNA, 14 nt, Artificial Sequence
  Description of Artificial Sequence: Synthetic oligonucleotide
gaucaaacuuuuuu

SEQ ID NO: 33752 - RNA, 14 nt, Artificial Sequence
  Description of Artificial Sequence: Synthetic oligonucleotide
ugaucaaacuuuuu

SEQ ID NO: 33753 - RNA, 14 nt, Artificial Sequence
  Description of Artificial Sequence: Synthetic oligonucleotide
augaucaaacuuuu

SEQ ID NO: 33754 - RNA, 14 nt, Artificial Sequence
  Description of Artificial Sequence: Synthetic oligonucleotide
caugaucaaacuuu

SEQ ID NO: 33755 - RNA, 14 nt, Artificial Sequence
  Description of Artificial Sequence: Synthetic oligonucleotide
ucaugaucaaacuu

SEQ ID NO: 33756 - RNA, 14 nt, Artificial Sequence
  Description of Artificial Sequence: Synthetic oligonucleotide
aucaugaucaaacu

SEQ ID NO: 33757 - RNA, 14 nt, Artificial Sequence
  Description of Artificial Sequence: Synthetic oligonucleotide
caucaugaucaaac

SEQ ID NO: 33758 - RNA, 14 nt, Artificial Sequence
  Description of Artificial Sequence: Synthetic oligonucleotide
gcaucaugaucaaa

SEQ ID NO: 33759 - RNA, 14 nt, Artificial Sequence
  Description of Artificial Sequence: Synthetic oligonucleotide
agcaucaugaucaa

SEQ ID NO: 33760 - RNA, 14 nt, Artificial Sequence
  Description of Artificial Sequence: Synthetic oligonucleotide
aagcaucaugauca

SEQ ID NO: 33761 - RNA, 14 nt, Artificial Sequence
  Description of Artificial Sequence: Synthetic oligonucleotide
gaagcaucaugauc

SEQ ID NO: 33762 - RNA, 14 nt, Artificial Sequence
  Description of Artificial Sequence: Synthetic oligonucleotide
ugaagcaucaugau

SEQ ID NO: 33763 - RNA, 14 nt, Artificial Sequence
  Description of Artificial Sequence: Synthetic oligonucleotide
uugaagcaucauga

SEQ ID NO: 33764 - RNA, 14 nt, Artificial Sequence
  Description of Artificial Sequence: Synthetic oligonucleotide
uuugaagcaucaug

SEQ ID NO: 33765 - RNA, 14 nt, Artificial Sequence
  Description of Artificial Sequence: Synthetic oligonucleotide
auuugaagcaucau

SEQ ID NO: 33766 - RNA, 14 nt, Artificial Sequence
  Description of Artificial Sequence: Synthetic oligonucleotide
aauuugaagcauca

SEQ ID NO: 33767 - RNA, 14 nt, Artificial Sequence
  Description of Artificial Sequence: Synthetic oligonucleotide
gaauuugaagcauc

SEQ ID NO: 33768 - RNA, 14 nt, Artificial Sequence
  Description of Artificial Sequence: Synthetic oligonucleotide
ggaauuugaagcau

SEQ ID NO: 33769 - RNA, 14 nt, Artificial Sequence
  Description of Artificial Sequence: Synthetic oligonucleotide
uggaauuugaagca

SEQ ID NO: 33770 - RNA, 14 nt, Artificial Sequence
  Description of Artificial Sequence: Synthetic oligonucleotide
uuggaauuugaagc

SEQ ID NO: 33771 - RNA, 14 nt, Artificial Sequence
  Description of Artificial Sequence: Synthetic oligonucleotide
cuuggaauuugaag

SEQ ID NO: 33772 - RNA, 14 nt, Artificial Sequence
  Description of Artificial Sequence: Synthetic oligonucleotide
ccuuggaauuugaa

SEQ ID NO: 33773 - RNA, 14 nt, Artificial Sequence
  Description of Artificial Sequence: Synthetic oligonucleotide
cccuuggaauuuga

SEQ ID NO: 33774 - RNA, 14 nt, Artificial Sequence
  Description of Artificial Sequence: Synthetic oligonucleotide
ucccuuggaauuug

SEQ ID NO: 33775 - RNA, 14 nt, Artificial Sequence
  Description of Artificial Sequence: Synthetic oligonucleotide
uucccuuggaauuu

SEQ ID NO: 33776 - RNA, 14 nt, Artificial Sequence
  Description of Artificial Sequence: Synthetic oligonucleotide
uuucccuuggaauu

SEQ ID NO: 33777 - RNA, 14 nt, Artificial Sequence
  Description of Artificial Sequence: Synthetic oligonucleotide
auuucccuuggaau

SEQ ID NO: 33778 - RNA, 14 nt, Artificial Sequence
  Description of Artificial Sequence: Synthetic oligonucleotide
uauuucccuuggaa

SEQ ID NO: 33779 - RNA, 14 nt, Artificial Sequence
  Description of Artificial Sequence: Synthetic oligonucleotide
auauuucccuugga

SEQ ID NO: 33780 - RNA, 14 nt, Artificial Sequence
  Description of Artificial Sequence: Synthetic oligonucleotide
cauauuucccuugg

SEQ ID NO: 33781 - RNA, 14 nt, Artificial Sequence
  Description of Artificial Sequence: Synthetic oligonucleotide
ucauauuucccuug

SEQ ID NO: 33782 - RNA, 14 nt, Artificial Sequence
  Description of Artificial Sequence: Synthetic oligonucleotide
uucauauuucccuu

SEQ ID NO: 33783 - RNA, 14 nt, Artificial Sequence
  Description of Artificial Sequence: Synthetic oligonucleotide
uuucauauuucccu

SEQ ID NO: 33784 - RNA, 14 nt, Artificial Sequence
  Description of Artificial Sequence: Synthetic oligonucleotide
auuucauauuuccc

SEQ ID NO: 33785 - RNA, 14 nt, Artificial Sequence
  Description of Artificial Sequence: Synthetic oligonucleotide
gauuucauauuucc

SEQ ID NO: 33786 - RNA, 14 nt, Artificial Sequence
  Description of Artificial Sequence: Synthetic oligonucleotide
agauuucauauuuc

SEQ ID NO: 33787 - RNA, 14 nt, Artificial Sequence
  Description of Artificial Sequence: Synthetic oligonucleotide
cagauuucauauuu

SEQ ID NO: 33788 - RNA, 14 nt, Artificial Sequence
  Description of Artificial Sequence: Synthetic oligonucleotide
ucagauuucauauu

SEQ ID NO: 33789 - RNA, 14 nt, Artificial Sequence
  Description of Artificial Sequence: Synthetic oligonucleotide
aucagauuucauau

SEQ ID NO: 33790 - RNA, 14 nt, Artificial Sequence
  Description of Artificial Sequence: Synthetic oligonucleotide
caucagauuucaua

SEQ ID NO: 33791 - RNA, 14 nt, Artificial Sequence
  Description of Artificial Sequence: Synthetic oligonucleotide
ucaucagauuucau

SEQ ID NO: 33792 - RNA, 14 nt, Artificial Sequence
  Description of Artificial Sequence: Synthetic oligonucleotide
aucaucagauuuca

SEQ ID NO: 33793 - RNA, 14 nt, Artificial Sequence
  Description of Artificial Sequence: Synthetic oligonucleotide
caucaucagauuuc

SEQ ID NO: 33794 - RNA, 14 nt, Artificial Sequence
  Description of Artificial Sequence: Synthetic oligonucleotide
ucaucaucagauuu

SEQ ID NO: 33795 - RNA, 14 nt, Artificial Sequence
  Description of Artificial Sequence: Synthetic oligonucleotide
aucaucaucagauu

SEQ ID NO: 33796 - RNA, 14 nt, Artificial Sequence
  Description of Artificial Sequence: Synthetic oligonucleotide
gaucaucaucagau

SEQ ID NO: 33797 - RNA, 14 nt, Artificial Sequence
  Description of Artificial Sequence: Synthetic oligonucleotide
ggaucaucaucaga

SEQ ID NO: 33798 - RNA, 14 nt, Artificial Sequence
  Description of Artificial Sequence: Synthetic oligonucleotide
aggaucaucaucag

SEQ ID NO: 33799 - RNA, 14 nt, Artificial Sequence
  Description of Artificial Sequence: Synthetic oligonucleotide
gaggaucaucauca

SEQ ID NO: 33800 - RNA, 14 nt, Artificial Sequence
  Description of Artificial Sequence: Synthetic oligonucleotide
ggaggaucaucauc

SEQ ID NO: 33801 - RNA, 14 nt, Artificial Sequence
  Description of Artificial Sequence: Synthetic oligonucleotide
aggaggaucaucau

SEQ ID NO: 33802 - RNA, 14 nt, Artificial Sequence
  Description of Artificial Sequence: Synthetic oligonucleotide
caggaggaucauca

SEQ ID NO: 33803 - RNA, 14 nt, Artificial Sequence
  Description of Artificial Sequence: Synthetic oligonucleotide
gcaggaggaucauc

SEQ ID NO: 33804 - RNA, 14 nt, Artificial Sequence
  Description of Artificial Sequence: Synthetic oligonucleotide
agcaggaggaucau

SEQ ID NO: 33805 - RNA, 14 nt, Artificial Sequence
  Description of Artificial Sequence: Synthetic oligonucleotide
uagcaggaggauca

SEQ ID NO: 33806 - RNA, 14 nt, Artificial Sequence
  Description of Artificial Sequence: Synthetic oligonucleotide
auagcaggaggauc

SEQ ID NO: 33807 - RNA, 14 nt, Artificial Sequence
  Description of Artificial Sequence: Synthetic oligonucleotide
aauagcaggaggau

SEQ ID NO: 33808 - RNA, 14 nt, Artificial Sequence
  Description of Artificial Sequence: Synthetic oligonucleotide
gaauagcaggagga

SEQ ID NO: 33809 - RNA, 14 nt, Artificial Sequence
  Description of Artificial Sequence: Synthetic oligonucleotide
ggaauagcaggagg

SEQ ID NO: 33810 - RNA, 14 nt, Artificial Sequence
  Description of Artificial Sequence: Synthetic oligonucleotide
uggaauagcaggag

SEQ ID NO: 33811 - RNA, 14 nt, Artificial Sequence
  Description of Artificial Sequence: Synthetic oligonucleotide
guggaauagcagga

SEQ ID NO: 33812 - RNA, 14 nt, Artificial Sequence
  Description of Artificial Sequence: Synthetic oligonucleotide
gguggaauagcagg

SEQ ID NO: 33813 - RNA, 14 nt, Artificial Sequence
  Description of Artificial Sequence: Synthetic oligonucleotide
cgguggaauagcag

SEQ ID NO: 33814 - RNA, 14 nt, Artificial Sequence
  Description of Artificial Sequence: Synthetic oligonucleotide
ucgguggaauagca

SEQ ID NO: 33815 - RNA, 14 nt, Artificial Sequence
  Description of Artificial Sequence: Synthetic oligonucleotide
cucgguggaauagc

SEQ ID NO: 33816 - RNA, 14 nt, Artificial Sequence
  Description of Artificial Sequence: Synthetic oligonucleotide
ucucgguggaauag

SEQ ID NO: 33817 - RNA, 14 nt, Artificial Sequence
  Description of Artificial Sequence: Synthetic oligonucleotide
gucucgguggaaua

SEQ ID NO: 33818 - RNA, 14 nt, Artificial Sequence
  Description of Artificial Sequence: Synthetic oligonucleotide
ugucucgguggaau

SEQ ID NO: 33819 - RNA, 14 nt, Artificial Sequence
  Description of Artificial Sequence: Synthetic oligonucleotide
cugucucgguggaa

SEQ ID NO: 33820 - RNA, 14 nt, Artificial Sequence
  Description of Artificial Sequence: Synthetic oligonucleotide
gcugucucggugga

SEQ ID NO: 33821 - RNA, 14 nt, Artificial Sequence
  Description of Artificial Sequence: Synthetic oligonucleotide
ggcugucucggugg

SEQ ID NO: 33822 - RNA, 14 nt, Artificial Sequence
  Description of Artificial Sequence: Synthetic oligonucleotide
aggcugucucggug

SEQ ID NO: 33823 - RNA, 14 nt, Artificial Sequence
  Description of Artificial Sequence: Synthetic oligonucleotide
gaggcugucucggu

SEQ ID NO: 33824 - RNA, 14 nt, Artificial Sequence
  Description of Artificial Sequence: Synthetic oligonucleotide
ggaggcugucucgg

SEQ ID NO: 33825 - RNA, 14 nt, Artificial Sequence
  Description of Artificial Sequence: Synthetic oligonucleotide
aggaggcugucucg

SEQ ID NO: 33826 - RNA, 14 nt, Artificial Sequence
  Description of Artificial Sequence: Synthetic oligonucleotide
gaggaggcugucuc

SEQ ID NO: 33827 - RNA, 14 nt, Artificial Sequence
  Description of Artificial Sequence: Synthetic oligonucleotide
ggaggaggcugucu

SEQ ID NO: 33828 - RNA, 14 nt, Artificial Sequence
  Description of Artificial Sequence: Synthetic oligonucleotide
aggaggaggcuguc

SEQ ID NO: 33829 - RNA, 14 nt, Artificial Sequence
  Description of Artificial Sequence: Synthetic oligonucleotide
gaggaggaggcugu

SEQ ID NO: 33830 - RNA, 14 nt, Artificial Sequence
  Description of Artificial Sequence: Synthetic oligonucleotide
ggaggaggaggcug

SEQ ID NO: 33831 - RNA, 14 nt, Artificial Sequence
  Description of Artificial Sequence: Synthetic oligonucleotide
uggaggaggaggcu

SEQ ID NO: 33832 - RNA, 14 nt, Artificial Sequence
  Description of Artificial Sequence: Synthetic oligonucleotide
uuggaggaggaggc

SEQ ID NO: 33833 - RNA, 14 nt, Artificial Sequence
  Description of Artificial Sequence: Synthetic oligonucleotide
uuuggaggaggagg

SEQ ID NO: 33834 - RNA, 14 nt, Artificial Sequence
  Description of Artificial Sequence: Synthetic oligonucleotide
cuuuggaggaggag

SEQ ID NO: 33835 - RNA, 14 nt, Artificial Sequence
  Description of Artificial Sequence: Synthetic oligonucleotide
ccuuuggaggagga

SEQ ID NO: 33836 - RNA, 14 nt, Artificial Sequence
  Description of Artificial Sequence: Synthetic oligonucleotide
accuuuggaggagg

SEQ ID NO: 33837 - RNA, 14 nt, Artificial Sequence
  Description of Artificial Sequence: Synthetic oligonucleotide
uaccuuuggaggag

SEQ ID NO: 33838 - RNA, 14 nt, Artificial Sequence
  Description of Artificial Sequence: Synthetic oligonucleotide
uuaccuuuggagga

SEQ ID NO: 33839 - RNA, 14 nt, Artificial Sequence
  Description of Artificial Sequence: Synthetic oligonucleotide
uuuaccuuuggagg

SEQ ID NO: 33840 - RNA, 14 nt, Artificial Sequence
  Description of Artificial Sequence: Synthetic oligonucleotide
uuuuaccuuuggag

SEQ ID NO: 33841 - RNA, 14 nt, Artificial Sequence
  Description of Artificial Sequence: Synthetic oligonucleotide
guuuuaccuuugga

SEQ ID NO: 33842 - RNA, 14 nt, Artificial Sequence
  Description of Artificial Sequence: Synthetic oligonucleotide
gguuuuaccuuugg

SEQ ID NO: 33843 - RNA, 14 nt, Artificial Sequence
  Description of Artificial Sequence: Synthetic oligonucleotide
ggguuuuaccuuug

SEQ ID NO: 33844 - RNA, 14 nt, Artificial Sequence
  Description of Artificial Sequence: Synthetic oligonucleotide
uggguuuuaccuuu

SEQ ID NO: 33845 - RNA, 14 nt, Artificial Sequence
  Description of Artificial Sequence: Synthetic oligonucleotide
cuggguuuuaccuu

SEQ ID NO: 33846 - RNA, 14 nt, Artificial Sequence
  Description of Artificial Sequence: Synthetic oligonucleotide
ucuggguuuuaccu

SEQ ID NO: 33847 - RNA, 14 nt, Artificial Sequence
  Description of Artificial Sequence: Synthetic oligonucleotide
cucuggguuuuacc

SEQ ID NO: 33848 - RNA, 14 nt, Artificial Sequence
  Description of Artificial Sequence: Synthetic oligonucleotide
acucuggguuuuac

SEQ ID NO: 33849 - RNA, 14 nt, Artificial Sequence
  Description of Artificial Sequence: Synthetic oligonucleotide
aacucuggguuuua

SEQ ID NO: 33850 - RNA, 14 nt, Artificial Sequence
  Description of Artificial Sequence: Synthetic oligonucleotide
gaacucuggguuuu

SEQ ID NO: 33851 - RNA, 14 nt, Artificial Sequence
  Description of Artificial Sequence: Synthetic oligonucleotide
ggaacucuggguuu

SEQ ID NO: 33852 - RNA, 14 nt, Artificial Sequence
  Description of Artificial Sequence: Synthetic oligonucleotide
aggaacucuggguu

SEQ ID NO: 33853 - RNA, 14 nt, Artificial Sequence
  Description of Artificial Sequence: Synthetic oligonucleotide
caggaacucugggu

SEQ ID NO: 33854 - RNA, 14 nt, Artificial Sequence
  Description of Artificial Sequence: Synthetic oligonucleotide
acaggaacucuggg

SEQ ID NO: 33855 - RNA, 14 nt, Artificial Sequence
  Description of Artificial Sequence: Synthetic oligonucleotide
aacaggaacucugg

SEQ ID NO: 33856 - RNA, 14 nt, Artificial Sequence
  Description of Artificial Sequence: Synthetic oligonucleotide
gaacaggaacucug

SEQ ID NO: 33857 - RNA, 14 nt, Artificial Sequence
  Description of Artificial Sequence: Synthetic oligonucleotide
ggaacaggaacucu

SEQ ID NO: 33858 - RNA, 14 nt, Artificial Sequence
  Description of Artificial Sequence: Synthetic oligonucleotide
aggaacaggaacuc

SEQ ID NO: 33859 - RNA, 14 nt, Artificial Sequence
  Description of Artificial Sequence: Synthetic oligonucleotide
uaggaacaggaacu

SEQ ID NO: 33860 - RNA, 14 nt, Artificial Sequence
  Description of Artificial Sequence: Synthetic oligonucleotide
guaggaacaggaac

SEQ ID NO: 33861 - RNA, 14 nt, Artificial Sequence
  Description of Artificial Sequence: Synthetic oligonucleotide
aguaggaacaggaa

SEQ ID NO: 33862 - RNA, 14 nt, Artificial Sequence
  Description of Artificial Sequence: Synthetic oligonucleotide
caguaggaacagga

SEQ ID NO: 33863 - RNA, 14 nt, Artificial Sequence
  Description of Artificial Sequence: Synthetic oligonucleotide
ccaguaggaacagg

SEQ ID NO: 33864 - RNA, 14 nt, Artificial Sequence
  Description of Artificial Sequence: Synthetic oligonucleotide
accaguaggaacag

SEQ ID NO: 33865 - RNA, 14 nt, Artificial Sequence
  Description of Artificial Sequence: Synthetic oligonucleotide
caccaguaggaaca

SEQ ID NO: 33866 - RNA, 14 nt, Artificial Sequence
  Description of Artificial Sequence: Synthetic oligonucleotide
gcaccaguaggaac

SEQ ID NO: 33867 - RNA, 14 nt, Artificial Sequence
  Description of Artificial Sequence: Synthetic oligonucleotide
ugcaccaguaggaa

SEQ ID NO: 33868 - RNA, 14 nt, Artificial Sequence
  Description of Artificial Sequence: Synthetic oligonucleotide
augcaccaguagga

SEQ ID NO: 33869 - RNA, 14 nt, Artificial Sequence
  Description of Artificial Sequence: Synthetic oligonucleotide
aaugcaccaguagg

SEQ ID NO: 33870 - RNA, 14 nt, Artificial Sequence
  Description of Artificial Sequence: Synthetic oligonucleotide
aaaugcaccaguag

SEQ ID NO: 33871 - RNA, 14 nt, Artificial Sequence
  Description of Artificial Sequence: Synthetic oligonucleotide
caaaugcaccagua

SEQ ID NO: 33872 - RNA, 14 nt, Artificial Sequence
  Description of Artificial Sequence: Synthetic oligonucleotide
ucaaaugcaccagu

SEQ ID NO: 33873 - RNA, 14 nt, Artificial Sequence
  Description of Artificial Sequence: Synthetic oligonucleotide
aucaaaugcaccag

SEQ ID NO: 33874 - RNA, 14 nt, Artificial Sequence
  Description of Artificial Sequence: Synthetic oligonucleotide
caucaaaugcacca

SEQ ID NO: 33875 - RNA, 14 nt, Artificial Sequence
  Description of Artificial Sequence: Synthetic oligonucleotide
ccaucaaaugcacc

SEQ ID NO: 33876 - RNA, 14 nt, Artificial Sequence
  Description of Artificial Sequence: Synthetic oligonucleotide
cccaucaaaugcac

SEQ ID NO: 33877 - RNA, 14 nt, Artificial Sequence
  Description of Artificial Sequence: Synthetic oligonucleotide
gcccaucaaaugca

SEQ ID NO: 33878 - RNA, 14 nt, Artificial Sequence
  Description of Artificial Sequence: Synthetic oligonucleotide
ggcccaucaaaugc

SEQ ID NO: 33879 - RNA, 14 nt, Artificial Sequence
  Description of Artificial Sequence: Synthetic oligonucleotide
aggcccaucaaaug

SEQ ID NO: 33880 - RNA, 14 nt, Artificial Sequence
  Description of Artificial Sequence: Synthetic oligonucleotide
gaggcccaucaaau

SEQ ID NO: 33881 - RNA, 14 nt, Artificial Sequence
  Description of Artificial Sequence: Synthetic oligonucleotide
agaggcccaucaaa

SEQ ID NO: 33882 - RNA, 14 nt, Artificial Sequence
  Description of Artificial Sequence: Synthetic oligonucleotide
cagaggcccaucaa

SEQ ID NO: 33883 - RNA, 14 nt, Artificial Sequence
  Description of Artificial Sequence: Synthetic oligonucleotide
gcagaggcccauca

SEQ ID NO: 33884 - RNA, 14 nt, Artificial Sequence
  Description of Artificial Sequence: Synthetic oligonucleotide
ugcagaggcccauc

SEQ ID NO: 33885 - RNA, 14 nt, Artificial Sequence
  Description of Artificial Sequence: Synthetic oligonucleotide
augcagaggcccau

SEQ ID NO: 33886 - RNA, 14 nt, Artificial Sequence
  Description of Artificial Sequence: Synthetic oligonucleotide
uaugcagaggccca

SEQ ID NO: 33887 - RNA, 14 nt, Artificial Sequence
  Description of Artificial Sequence: Synthetic oligonucleotide
cuaugcagaggccc

SEQ ID NO: 33888 - RNA, 14 nt, Artificial Sequence
  Description of Artificial Sequence: Synthetic oligonucleotide
acuaugcagaggcc

SEQ ID NO: 33889 - RNA, 14 nt, Artificial Sequence
  Description of Artificial Sequence: Synthetic oligonucleotide
gacuaugcagaggc

SEQ ID NO: 33890 - RNA, 14 nt, Artificial Sequence
  Description of Artificial Sequence: Synthetic oligonucleotide
ggacuaugcagagg

SEQ ID NO: 33891 - RNA, 14 nt, Artificial Sequence
  Description of Artificial Sequence: Synthetic oligonucleotide
uggacuaugcagag

SEQ ID NO: 33892 - RNA, 14 nt, Artificial Sequence
  Description of Artificial Sequence: Synthetic oligonucleotide
guggacuaugcaga

SEQ ID NO: 33893 - RNA, 14 nt, Artificial Sequence
  Description of Artificial Sequence: Synthetic oligonucleotide
gguggacuaugcag

SEQ ID NO: 33894 - RNA, 14 nt, Artificial Sequence
  Description of Artificial Sequence: Synthetic oligonucleotide
agguggacuaugca

SEQ ID NO: 33895 - RNA, 14 nt, Artificial Sequence
  Description of Artificial Sequence: Synthetic oligonucleotide
gagguggacuaugc

SEQ ID NO: 33896 - RNA, 14 nt, Artificial Sequence
  Description of Artificial Sequence: Synthetic oligonucleotide
ggagguggacuaug

SEQ ID NO: 33897 - RNA, 14 nt, Artificial Sequence
  Description of Artificial Sequence: Synthetic oligonucleotide
cggagguggacuau

SEQ ID NO: 33898 - RNA, 14 nt, Artificial Sequence
  Description of Artificial Sequence: Synthetic oligonucleotide
gcggagguggacua

SEQ ID NO: 33899 - RNA, 14 nt, Artificial Sequence
  Description of Artificial Sequence: Synthetic oligonucleotide
ggcggagguggacu

SEQ ID NO: 33900 - RNA, 14 nt, Artificial Sequence
  Description of Artificial Sequence: Synthetic oligonucleotide
uggcggagguggac

SEQ ID NO: 33901 - RNA, 14 nt, Artificial Sequence
  Description of Artificial Sequence: Synthetic oligonucleotide
guggcggaggugga

SEQ ID NO: 33902 - RNA, 14 nt, Artificial Sequence
  Description of Artificial Sequence: Synthetic oligonucleotide
gguggcggaggugg

SEQ ID NO: 33903 - RNA, 14 nt, Artificial Sequence
  Description of Artificial Sequence: Synthetic oligonucleotide
ugguggcggaggug

SEQ ID NO: 33904 - RNA, 14 nt, Artificial Sequence
  Description of Artificial Sequence: Synthetic oligonucleotide
gugguggcggaggu

SEQ ID NO: 33905 - RNA, 14 nt, Artificial Sequence
  Description of Artificial Sequence: Synthetic oligonucleotide
ggugguggcggagg

SEQ ID NO: 33906 - RNA, 14 nt, Artificial Sequence
  Description of Artificial Sequence: Synthetic oligonucleotide
uggugguggcggag

SEQ ID NO: 33907 - RNA, 14 nt, Artificial Sequence
  Description of Artificial Sequence: Synthetic oligonucleotide
uuggugguggcgga

SEQ ID NO: 33908 - RNA, 14 nt, Artificial Sequence
  Description of Artificial Sequence: Synthetic oligonucleotide
cuuggugguggcgg

SEQ ID NO: 33909 - RNA, 14 nt, Artificial Sequence
  Description of Artificial Sequence: Synthetic oligonucleotide
ucuuggugguggcg

SEQ ID NO: 33910 - RNA, 14 nt, Artificial Sequence
  Description of Artificial Sequence: Synthetic oligonucleotide
cucuuggugguggc

SEQ ID NO: 33911 - RNA, 14 nt, Artificial Sequence
  Description of Artificial Sequence: Synthetic oligonucleotide
ucucuugguggugg

SEQ ID NO: 33912 - RNA, 14 nt, Artificial Sequence
  Description of Artificial Sequence: Synthetic oligonucleotide
aucucuugguggug

SEQ ID NO: 33913 - RNA, 14 nt, Artificial Sequence
  Description of Artificial Sequence: Synthetic oligonucleotide
gaucucuugguggu

SEQ ID NO: 33914 - RNA, 14 nt, Artificial Sequence
  Description of Artificial Sequence: Synthetic oligonucleotide
ggaucucuuggugg

SEQ ID NO: 33915 - RNA, 14 nt, Artificial Sequence
  Description of Artificial Sequence: Synthetic oligonucleotide
aggaucucuuggug

SEQ ID NO: 33916 - RNA, 14 nt, Artificial Sequence
  Description of Artificial Sequence: Synthetic oligonucleotide
gaggaucucuuggu

SEQ ID NO: 33917 - RNA, 14 nt, Artificial Sequence
  Description of Artificial Sequence: Synthetic oligonucleotide
agaggaucucuugg

SEQ ID NO: 33918 - RNA, 14 nt, Artificial Sequence
  Description of Artificial Sequence: Synthetic oligonucleotide
aagaggaucucuug

SEQ ID NO: 33919 - RNA, 14 nt, Artificial Sequence
  Description of Artificial Sequence: Synthetic oligonucleotide
gaagaggaucucuu

SEQ ID NO: 33920 - RNA, 14 nt, Artificial Sequence
  Description of Artificial Sequence: Synthetic oligonucleotide
ggaagaggaucucu

SEQ ID NO: 33921 - RNA, 14 nt, Artificial Sequence
  Description of Artificial Sequence: Synthetic oligonucleotide
aggaagaggaucuc

SEQ ID NO: 33922 - RNA, 14 nt, Artificial Sequence
  Description of Artificial Sequence: Synthetic oligonucleotide
caggaagaggaucu

SEQ ID NO: 33923 - RNA, 14 nt, Artificial Sequence
  Description of Artificial Sequence: Synthetic oligonucleotide
ucaggaagaggauc

SEQ ID NO: 33924 - RNA, 14 nt, Artificial Sequence
  Description of Artificial Sequence: Synthetic oligonucleotide
aucaggaagaggau

SEQ ID NO: 33925 - RNA, 14 nt, Artificial Sequence
  Description of Artificial Sequence: Synthetic oligonucleotide
uaucaggaagagga

SEQ ID NO: 33926 - RNA, 14 nt, Artificial Sequence
  Description of Artificial Sequence: Synthetic oligonucleotide
guaucaggaagagg

SEQ ID NO: 33927 - RNA, 14 nt, Artificial Sequence
  Description of Artificial Sequence: Synthetic oligonucleotide
gguaucaggaagag

SEQ ID NO: 33928 - RNA, 14 nt, Artificial Sequence
  Description of Artificial Sequence: Synthetic oligonucleotide
ggguaucaggaaga

SEQ ID NO: 33929 - RNA, 14 nt, Artificial Sequence
  Description of Artificial Sequence: Synthetic oligonucleotide
gggguaucaggaag

SEQ ID NO: 33930 - RNA, 14 nt, Artificial Sequence
  Description of Artificial Sequence: Synthetic oligonucleotide
agggguaucaggaa

SEQ ID NO: 33931 - RNA, 14 nt, Artificial Sequence
  Description of Artificial Sequence: Synthetic oligonucleotide
gagggguaucagga

SEQ ID NO: 33932 - RNA, 14 nt, Artificial Sequence
  Description of Artificial Sequence: Synthetic oligonucleotide
ggagggguaucagg

SEQ ID NO: 33933 - RNA, 14 nt, Artificial Sequence
  Description of Artificial Sequence: Synthetic oligonucleotide
uggagggguaucag

SEQ ID NO: 33934 - RNA, 14 nt, Artificial Sequence
  Description of Artificial Sequence: Synthetic oligonucleotide
guggagggguauca

SEQ ID NO: 33935 - RNA, 14 nt, Artificial Sequence
  Description of Artificial Sequence: Synthetic oligonucleotide
gguggagggguauc

SEQ ID NO: 33936 - RNA, 14 nt, Artificial Sequence
  Description of Artificial Sequence: Synthetic oligonucleotide
ugguggagggguau

SEQ ID NO: 33937 - RNA, 14 nt, Artificial Sequence
  Description of Artificial Sequence: Synthetic oligonucleotide
cugguggaggggua

SEQ ID NO: 33938 - RNA, 14 nt, Artificial Sequence
  Description of Artificial Sequence: Synthetic oligonucleotide
acugguggaggggu

SEQ ID NO: 33939 - RNA, 14 nt, Artificial Sequence
  Description of Artificial Sequence: Synthetic oligonucleotide
aacugguggagggg

SEQ ID NO: 33940 - RNA, 14 nt, Artificial Sequence
  Description of Artificial Sequence: Synthetic oligonucleotide
gaacugguggaggg

SEQ ID NO: 33941 - RNA, 14 nt, Artificial Sequence
  Description of Artificial Sequence: Synthetic oligonucleotide
ggaacugguggagg

SEQ ID NO: 33942 - RNA, 14 nt, Artificial Sequence
  Description of Artificial Sequence: Synthetic oligonucleotide
gggaacugguggag

SEQ ID NO: 33943 - RNA, 14 nt, Artificial Sequence
  Description of Artificial Sequence: Synthetic oligonucleotide
ggggaacuggugga

SEQ ID NO: 33944 - RNA, 14 nt, Artificial Sequence
  Description of Artificial Sequence: Synthetic oligonucleotide
aggggaacuggugg

SEQ ID NO: 33945 - RNA, 14 nt, Artificial Sequence
  Description of Artificial Sequence: Synthetic oligonucleotide
aaggggaacuggug

SEQ ID NO: 33946 - RNA, 14 nt, Artificial Sequence
  Description of Artificial Sequence: Synthetic oligonucleotide
gaaggggaacuggu

SEQ ID NO: 33947 - RNA, 14 nt, Artificial Sequence
  Description of Artificial Sequence: Synthetic oligonucleotide
cgaaggggaacugg

SEQ ID NO: 33948 - RNA, 14 nt, Artificial Sequence
  Description of Artificial Sequence: Synthetic oligonucleotide
ccgaaggggaacug

SEQ ID NO: 33949 - RNA, 14 nt, Artificial Sequence
  Description of Artificial Sequence: Synthetic oligonucleotide
gccgaaggggaacu

SEQ ID NO: 33950 - DNA, 14 bp, Artificial Sequence
  Description of Artificial Sequence: Synthetic oligonucleotide
ggccgaaggggaac

SEQ ID NO: 33951 - DNA, 14 bp, Artificial Sequence
  Description of Artificial Sequence: Synthetic oligonucleotide
aggccgaaggggaa

SEQ ID NO: 33952 - DNA, 14 bp, Artificial Sequence
  Description of Artificial Sequence: Synthetic oligonucleotide
gaggccgaagggga

SEQ ID NO: 33953 - DNA, 14 bp, Artificial Sequence
  Description of Artificial Sequence: Synthetic oligonucleotide
ggaggccgaagggg

SEQ ID NO: 33954 - RNA, 14 nt, Artificial Sequence
  Description of Artificial Sequence: Synthetic oligonucleotide
uggaggccgaaggg

SEQ ID NO: 33955 - RNA, 14 nt, Artificial Sequence
  Description of Artificial Sequence: Synthetic oligonucleotide
cuggaggccgaagg

SEQ ID NO: 33956 - RNA, 14 nt, Artificial Sequence
  Description of Artificial Sequence: Synthetic oligonucleotide
ucuggaggccgaag

SEQ ID NO: 33957 - RNA, 14 nt, Artificial Sequence
  Description of Artificial Sequence: Synthetic oligonucleotide
uucuggaggccgaa

SEQ ID NO: 33958 - RNA, 14 nt, Artificial Sequence
  Description of Artificial Sequence: Synthetic oligonucleotide
guucuggaggccga

SEQ ID NO: 33959 - RNA, 14 nt, Artificial Sequence
  Description of Artificial Sequence: Synthetic oligonucleotide
uguucuggaggccg

SEQ ID NO: 33960 - RNA, 14 nt, Artificial Sequence
  Description of Artificial Sequence: Synthetic oligonucleotide
guguucuggaggcc

SEQ ID NO: 33961 - RNA, 14 nt, Artificial Sequence
  Description of Artificial Sequence: Synthetic oligonucleotide
aguguucuggaggc

SEQ ID NO: 33962 - RNA, 14 nt, Artificial Sequence
  Description of Artificial Sequence: Synthetic oligonucleotide
aaguguucuggagg

SEQ ID NO: 33963 - RNA, 14 nt, Artificial Sequence
  Description of Artificial Sequence: Synthetic oligonucleotide
aaaguguucuggag

SEQ ID NO: 33964 - RNA, 14 nt, Artificial Sequence
  Description of Artificial Sequence: Synthetic oligonucleotide
uaaaguguucugga

SEQ ID NO: 33965 - RNA, 14 nt, Artificial Sequence
  Description of Artificial Sequence: Synthetic oligonucleotide
auaaaguguucugg

SEQ ID NO: 33966 - RNA, 14 nt, Artificial Sequence
  Description of Artificial Sequence: Synthetic oligonucleotide
uauaaaguguucug

SEQ ID NO: 33967 - RNA, 14 nt, Artificial Sequence
  Description of Artificial Sequence: Synthetic oligonucleotide
uuauaaaguguucu

SEQ ID NO: 33968 - RNA, 14 nt, Artificial Sequence
  Description of Artificial Sequence: Synthetic oligonucleotide
uuuauaaaguguuc

SEQ ID NO: 33969 - RNA, 14 nt, Artificial Sequence
  Description of Artificial Sequence: Synthetic oligonucleotide
guuuauaaaguguu

SEQ ID NO: 33970 - RNA, 14 nt, Artificial Sequence
  Description of Artificial Sequence: Synthetic oligonucleotide
aguuuauaaagugu

SEQ ID NO: 33971 - RNA, 14 nt, Artificial Sequence
  Description of Artificial Sequence: Synthetic oligonucleotide
caguuuauaaagug

SEQ ID NO: 33972 - RNA, 14 nt, Artificial Sequence
  Description of Artificial Sequence: Synthetic oligonucleotide
acaguuuauaaagu

SEQ ID NO: 33973 - RNA, 14 nt, Artificial Sequence
  Description of Artificial Sequence: Synthetic oligonucleotide
gacaguuuauaaag

SEQ ID NO: 33974 - RNA, 14 nt, Artificial Sequence
  Description of Artificial Sequence: Synthetic oligonucleotide
ggacaguuuauaaa

SEQ ID NO: 33975 - RNA, 14 nt, Artificial Sequence
  Description of Artificial Sequence: Synthetic oligonucleotide
uggacaguuuauaa

SEQ ID NO: 33976 - RNA, 14 nt, Artificial Sequence
  Description of Artificial Sequence: Synthetic oligonucleotide
auggacaguuuaua

SEQ ID NO: 33977 - RNA, 14 nt, Artificial Sequence
  Description of Artificial Sequence: Synthetic oligonucleotide
aauggacaguuuau

SEQ ID NO: 33978 - RNA, 14 nt, Artificial Sequence
  Description of Artificial Sequence: Synthetic oligonucleotide
aaauggacaguuua

SEQ ID NO: 33979 - RNA, 14 nt, Artificial Sequence
  Description of Artificial Sequence: Synthetic oligonucleotide
uaaauggacaguuu

SEQ ID NO: 33980 - RNA, 14 nt, Artificial Sequence
  Description of Artificial Sequence: Synthetic oligonucleotide
uuaaauggacaguu

SEQ ID NO: 33981 - RNA, 14 nt, Artificial Sequence
  Description of Artificial Sequence: Synthetic oligonucleotide
auuaaauggacagu

SEQ ID NO: 33982 - RNA, 14 nt, Artificial Sequence
  Description of Artificial Sequence: Synthetic oligonucleotide
gauuaaauggacag

SEQ ID NO: 33983 - RNA, 14 nt, Artificial Sequence
  Description of Artificial Sequence: Synthetic oligonucleotide
agauuaaauggaca

SEQ ID NO: 33984 - RNA, 14 nt, Artificial Sequence
  Description of Artificial Sequence: Synthetic oligonucleotide
aagauuaaauggac

SEQ ID NO: 33985 - RNA, 14 nt, Artificial Sequence
  Description of Artificial Sequence: Synthetic oligonucleotide
gaagauuaaaugga

SEQ ID NO: 33986 - RNA, 14 nt, Artificial Sequence
  Description of Artificial Sequence: Synthetic oligonucleotide
ugaagauuaaaugg

SEQ ID NO: 33987 - RNA, 14 nt, Artificial Sequence
  Description of Artificial Sequence: Synthetic oligonucleotide
cugaagauuaaaug

SEQ ID NO: 33988 - RNA, 14 nt, Artificial Sequence
  Description of Artificial Sequence: Synthetic oligonucleotide
gcugaagauuaaau

SEQ ID NO: 33989 - RNA, 14 nt, Artificial Sequence
  Description of Artificial Sequence: Synthetic oligonucleotide
ggcugaagauuaaa

SEQ ID NO: 33990 - RNA, 14 nt, Artificial Sequence
  Description of Artificial Sequence: Synthetic oligonucleotide
uggcugaagauuaa

SEQ ID NO: 33991 - RNA, 14 nt, Artificial Sequence
  Description of Artificial Sequence: Synthetic oligonucleotide
guggcugaagauua

SEQ ID NO: 33992 - RNA, 14 nt, Artificial Sequence
  Description of Artificial Sequence: Synthetic oligonucleotide
gguggcugaagauu

SEQ ID NO: 33993 - RNA, 14 nt, Artificial Sequence
  Description of Artificial Sequence: Synthetic oligonucleotide
agguggcugaagau

SEQ ID NO: 33994 - RNA, 14 nt, Artificial Sequence
  Description of Artificial Sequence: Synthetic oligonucleotide
gagguggcugaaga

SEQ ID NO: 33995 - RNA, 14 nt, Artificial Sequence
  Description of Artificial Sequence: Synthetic oligonucleotide
ggagguggcugaag

SEQ ID NO: 33996 - RNA, 14 nt, Artificial Sequence
  Description of Artificial Sequence: Synthetic oligonucleotide
uggagguggcugaa

SEQ ID NO: 33997 - RNA, 14 nt, Artificial Sequence
  Description of Artificial Sequence: Synthetic oligonucleotide
guggagguggcuga

SEQ ID NO: 33998 - RNA, 14 nt, Artificial Sequence
  Description of Artificial Sequence: Synthetic oligonucleotide
aguggagguggcug

SEQ ID NO: 33999 - RNA, 14 nt, Artificial Sequence
  Description of Artificial Sequence: Synthetic oligonucleotide
caguggagguggcu

SEQ ID NO: 34000 - RNA, 14 nt, Artificial Sequence
  Description of Artificial Sequence: Synthetic oligonucleotide
ccaguggagguggc

SEQ ID NO: 34001 - RNA, 14 nt, Artificial Sequence
  Description of Artificial Sequence: Synthetic oligonucleotide
cccaguggaggugg

SEQ ID NO: 34002 - RNA, 14 nt, Artificial Sequence
  Description of Artificial Sequence: Synthetic oligonucleotide
ccccaguggaggug

SEQ ID NO: 34003 - RNA, 14 nt, Artificial Sequence
  Description of Artificial Sequence: Synthetic oligonucleotide
gccccaguggaggu

SEQ ID NO: 34004 - RNA, 14 nt, Artificial Sequence
  Description of Artificial Sequence: Synthetic oligonucleotide
ugccccaguggagg

SEQ ID NO: 34005 - RNA, 14 nt, Artificial Sequence
  Description of Artificial Sequence: Synthetic oligonucleotide
augccccaguggag

SEQ ID NO: 34006 - RNA, 14 nt, Artificial Sequence
  Description of Artificial Sequence: Synthetic oligonucleotide
gaugccccagugga

SEQ ID NO: 34007 - RNA, 14 nt, Artificial Sequence
  Description of Artificial Sequence: Synthetic oligonucleotide
agaugccccagugg

SEQ ID NO: 34008 - RNA, 14 nt, Artificial Sequence
  Description of Artificial Sequence: Synthetic oligonucleotide
aagaugccccagug

SEQ ID NO: 34009 - RNA, 14 nt, Artificial Sequence
  Description of Artificial Sequence: Synthetic oligonucleotide
gaagaugccccagu

SEQ ID NO: 34010 - RNA, 14 nt, Artificial Sequence
  Description of Artificial Sequence: Synthetic oligonucleotide
ugaagaugccccag

SEQ ID NO: 34011 - RNA, 14 nt, Artificial Sequence
  Description of Artificial Sequence: Synthetic oligonucleotide
gugaagaugcccca

SEQ ID NO: 34012 - RNA, 14 nt, Artificial Sequence
  Description of Artificial Sequence: Synthetic oligonucleotide
ugugaagaugcccc

SEQ ID NO: 34013 - RNA, 14 nt, Artificial Sequence
  Description of Artificial Sequence: Synthetic oligonucleotide
cugugaagaugccc

SEQ ID NO: 34014 - RNA, 14 nt, Artificial Sequence
  Description of Artificial Sequence: Synthetic oligonucleotide
ucugugaagaugcc

SEQ ID NO: 34015 - RNA, 14 nt, Artificial Sequence
  Description of Artificial Sequence: Synthetic oligonucleotide
cucugugaagaugc

SEQ ID NO: 34016 - RNA, 14 nt, Artificial Sequence
  Description of Artificial Sequence: Synthetic oligonucleotide
ucucugugaagaug

SEQ ID NO: 34017 - RNA, 14 nt, Artificial Sequence
  Description of Artificial Sequence: Synthetic oligonucleotide
aucucugugaagau

SEQ ID NO: 34018 - RNA, 14 nt, Artificial Sequence
  Description of Artificial Sequence: Synthetic oligonucleotide
aaucucugugaaga

SEQ ID NO: 34019 - RNA, 14 nt, Artificial Sequence
  Description of Artificial Sequence: Synthetic oligonucleotide
gaaucucugugaag

SEQ ID NO: 34020 - RNA, 14 nt, Artificial Sequence
  Description of Artificial Sequence: Synthetic oligonucleotide
ugaaucucugugaa

SEQ ID NO: 34021 - RNA, 14 nt, Artificial Sequence
  Description of Artificial Sequence: Synthetic oligonucleotide
cugaaucucuguga

SEQ ID NO: 34022 - RNA, 14 nt, Artificial Sequence
  Description of Artificial Sequence: Synthetic oligonucleotide
ucugaaucucugug

SEQ ID NO: 34023 - RNA, 14 nt, Artificial Sequence
  Description of Artificial Sequence: Synthetic oligonucleotide
gucugaaucucugu

SEQ ID NO: 34024 - RNA, 14 nt, Artificial Sequence
  Description of Artificial Sequence: Synthetic oligonucleotide
agucugaaucucug

SEQ ID NO: 34025 - RNA, 14 nt, Artificial Sequence
  Description of Artificial Sequence: Synthetic oligonucleotide
cagucugaaucucu

SEQ ID NO: 34026 - RNA, 14 nt, Artificial Sequence
  Description of Artificial Sequence: Synthetic oligonucleotide
ccagucugaaucuc

SEQ ID NO: 34027 - RNA, 14 nt, Artificial Sequence
  Description of Artificial Sequence: Synthetic oligonucleotide
gccagucugaaucu

SEQ ID NO: 34028 - RNA, 14 nt, Artificial Sequence
  Description of Artificial Sequence: Synthetic oligonucleotide
agccagucugaauc

SEQ ID NO: 34029 - RNA, 14 nt, Artificial Sequence
  Description of Artificial Sequence: Synthetic oligonucleotide
gagccagucugaau

SEQ ID NO: 34030 - RNA, 14 nt, Artificial Sequence
  Description of Artificial Sequence: Synthetic oligonucleotide
ugagccagucugaa

SEQ ID NO: 34031 - RNA, 14 nt, Artificial Sequence
  Description of Artificial Sequence: Synthetic oligonucleotide
cugagccagucuga

SEQ ID NO: 34032 - RNA, 14 nt, Artificial Sequence
  Description of Artificial Sequence: Synthetic oligonucleotide
ucugagccagucug

SEQ ID NO: 34033 - RNA, 14 nt, Artificial Sequence
  Description of Artificial Sequence: Synthetic oligonucleotide
cucugagccagucu

SEQ ID NO: 34034 - RNA, 14 nt, Artificial Sequence
  Description of Artificial Sequence: Synthetic oligonucleotide
ucucugagccaguc

SEQ ID NO: 34035 - RNA, 14 nt, Artificial Sequence
  Description of Artificial Sequence: Synthetic oligonucleotide
gucucugagccagu

SEQ ID NO: 34036 - RNA, 14 nt, Artificial Sequence
  Description of Artificial Sequence: Synthetic oligonucleotide
ugucucugagccag

SEQ ID NO: 34037 - RNA, 14 nt, Artificial Sequence
  Description of Artificial Sequence: Synthetic oligonucleotide
augucucugagcca

SEQ ID NO: 34038 - RNA, 14 nt, Artificial Sequence
  Description of Artificial Sequence: Synthetic oligonucleotide
aaugucucugagcc

SEQ ID NO: 34039 - RNA, 14 nt, Artificial Sequence
  Description of Artificial Sequence: Synthetic oligonucleotide
uaaugucucugagc

SEQ ID NO: 34040 - RNA, 14 nt, Artificial Sequence
  Description of Artificial Sequence: Synthetic oligonucleotide
cuaaugucucugag

SEQ ID NO: 34041 - RNA, 14 nt, Artificial Sequence
  Description of Artificial Sequence: Synthetic oligonucleotide
acuaaugucucuga

SEQ ID NO: 34042 - RNA, 14 nt, Artificial Sequence
  Description of Artificial Sequence: Synthetic oligonucleotide
uacuaaugucucug

SEQ ID NO: 34043 - RNA, 14 nt, Artificial Sequence
  Description of Artificial Sequence: Synthetic oligonucleotide
guacuaaugucucu

SEQ ID NO: 34044 - RNA, 14 nt, Artificial Sequence
  Description of Artificial Sequence: Synthetic oligonucleotide
cguacuaaugucuc

SEQ ID NO: 34045 - RNA, 14 nt, Artificial Sequence
  Description of Artificial Sequence: Synthetic oligonucleotide
acguacuaaugucu

SEQ ID NO: 34046 - RNA, 14 nt, Artificial Sequence
  Description of Artificial Sequence: Synthetic oligonucleotide
cacguacuaauguc

SEQ ID NO: 34047 - RNA, 14 nt, Artificial Sequence
  Description of Artificial Sequence: Synthetic oligonucleotide
acacguacuaaugu

SEQ ID NO: 34048 - RNA, 14 nt, Artificial Sequence
  Description of Artificial Sequence: Synthetic oligonucleotide
gacacguacuaaug

SEQ ID NO: 34049 - RNA, 14 nt, Artificial Sequence
  Description of Artificial Sequence: Synthetic oligonucleotide
ggacacguacuaau

SEQ ID NO: 34050 - RNA, 14 nt, Artificial Sequence
  Description of Artificial Sequence: Synthetic oligonucleotide
uggacacguacuaa

SEQ ID NO: 34051 - RNA, 14 nt, Artificial Sequence
  Description of Artificial Sequence: Synthetic oligonucleotide
uuggacacguacua

SEQ ID NO: 34052 - RNA, 14 nt, Artificial Sequence
  Description of Artificial Sequence: Synthetic oligonucleotide
uuuggacacguacu

SEQ ID NO: 34053 - RNA, 14 nt, Artificial Sequence
  Description of Artificial Sequence: Synthetic oligonucleotide
auuuggacacguac

SEQ ID NO: 34054 - RNA, 14 nt, Artificial Sequence
  Description of Artificial Sequence: Synthetic oligonucleotide
aauuuggacacgua

SEQ ID NO: 34055 - RNA, 14 nt, Artificial Sequence
  Description of Artificial Sequence: Synthetic oligonucleotide
gaauuuggacacgu

SEQ ID NO: 34056 - RNA, 14 nt, Artificial Sequence
  Description of Artificial Sequence: Synthetic oligonucleotide
cgaauuuggacacg

SEQ ID NO: 34057 - RNA, 14 nt, Artificial Sequence
  Description of Artificial Sequence: Synthetic oligonucleotide
gcgaauuuggacac

SEQ ID NO: 34058 - RNA, 14 nt, Artificial Sequence
  Description of Artificial Sequence: Synthetic oligonucleotide
ggcgaauuuggaca

SEQ ID NO: 34059 - RNA, 14 nt, Artificial Sequence
  Description of Artificial Sequence: Synthetic oligonucleotide
uggcgaauuuggac

SEQ ID NO: 34060 - RNA, 14 nt, Artificial Sequence
  Description of Artificial Sequence: Synthetic oligonucleotide
uuggcgaauuugga

SEQ ID NO: 34061 - RNA, 14 nt, Artificial Sequence
  Description of Artificial Sequence: Synthetic oligonucleotide
cuuggcgaauuugg

SEQ ID NO: 34062 - RNA, 14 nt, Artificial Sequence
  Description of Artificial Sequence: Synthetic oligonucleotide
gcuuggcgaauuug

SEQ ID NO: 34063 - RNA, 14 nt, Artificial Sequence
  Description of Artificial Sequence: Synthetic oligonucleotide
ugcuuggcgaauuu

SEQ ID NO: 34064 - RNA, 14 nt, Artificial Sequence
  Description of Artificial Sequence: Synthetic oligonucleotide
gugcuuggcgaauu

SEQ ID NO: 34065 - RNA, 14 nt, Artificial Sequence
  Description of Artificial Sequence: Synthetic oligonucleotide
agugcuuggcgaau

SEQ ID NO: 34066 - RNA, 14 nt, Artificial Sequence
  Description of Artificial Sequence: Synthetic oligonucleotide
gagugcuuggcgaa

SEQ ID NO: 34067 - RNA, 14 nt, Artificial Sequence
  Description of Artificial Sequence: Synthetic oligonucleotide
ggagugcuuggcga

SEQ ID NO: 34068 - RNA, 14 nt, Artificial Sequence
  Description of Artificial Sequence: Synthetic oligonucleotide
aggagugcuuggcg

SEQ ID NO: 34069 - RNA, 14 nt, Artificial Sequence
  Description of Artificial Sequence: Synthetic oligonucleotide
gaggagugcuuggc

SEQ ID NO: 34070 - RNA, 14 nt, Artificial Sequence
  Description of Artificial Sequence: Synthetic oligonucleotide
ggaggagugcuugg

SEQ ID NO: 34071 - RNA, 14 nt, Artificial Sequence
  Description of Artificial Sequence: Synthetic oligonucleotide
aggaggagugcuug

SEQ ID NO: 34072 - RNA, 14 nt, Artificial Sequence
  Description of Artificial Sequence: Synthetic oligonucleotide
uaggaggagugcuu

SEQ ID NO: 34073 - RNA, 14 nt, Artificial Sequence
  Description of Artificial Sequence: Synthetic oligonucleotide
cuaggaggagugcu

SEQ ID NO: 34074 - RNA, 14 nt, Artificial Sequence
  Description of Artificial Sequence: Synthetic oligonucleotide
gcuaggaggagugc

SEQ ID NO: 34075 - RNA, 14 nt, Artificial Sequence
  Description of Artificial Sequence: Synthetic oligonucleotide
ugcuaggaggagug

SEQ ID NO: 34076 - RNA, 14 nt, Artificial Sequence
  Description of Artificial Sequence: Synthetic oligonucleotide
gugcuaggaggagu

SEQ ID NO: 34077 - RNA, 14 nt, Artificial Sequence
  Description of Artificial Sequence: Synthetic oligonucleotide
ugugcuaggaggag

SEQ ID NO: 34078 - RNA, 14 nt, Artificial Sequence
  Description of Artificial Sequence: Synthetic oligonucleotide
gugugcuaggagga

SEQ ID NO: 34079 - RNA, 14 nt, Artificial Sequence
  Description of Artificial Sequence: Synthetic oligonucleotide
ggugugcuaggagg

SEQ ID NO: 34080 - RNA, 14 nt, Artificial Sequence
  Description of Artificial Sequence: Synthetic oligonucleotide
gggugugcuaggag

SEQ ID NO: 34081 - RNA, 14 nt, Artificial Sequence
  Description of Artificial Sequence: Synthetic oligonucleotide
agggugugcuagga

SEQ ID NO: 34082 - RNA, 14 nt, Artificial Sequence
  Description of Artificial Sequence: Synthetic oligonucleotide
gagggugugcuagg

SEQ ID NO: 34083 - RNA, 14 nt, Artificial Sequence
  Description of Artificial Sequence: Synthetic oligonucleotide
agagggugugcuag

SEQ ID NO: 34084 - RNA, 14 nt, Artificial Sequence
  Description of Artificial Sequence: Synthetic oligonucleotide
gagagggugugcua

SEQ ID NO: 34085 - RNA, 14 nt, Artificial Sequence
  Description of Artificial Sequence: Synthetic oligonucleotide
ggagagggugugcu

SEQ ID NO: 34086 - RNA, 14 nt, Artificial Sequence
  Description of Artificial Sequence: Synthetic oligonucleotide
uggagagggugugc

SEQ ID NO: 34087 - RNA, 14 nt, Artificial Sequence
  Description of Artificial Sequence: Synthetic oligonucleotide
uuggagagggugug

SEQ ID NO: 34088 - RNA, 14 nt, Artificial Sequence
  Description of Artificial Sequence: Synthetic oligonucleotide
cuuggagagggugu

SEQ ID NO: 34089 - RNA, 14 nt, Artificial Sequence
  Description of Artificial Sequence: Synthetic oligonucleotide
ccuuggagagggug

SEQ ID NO: 34090 - RNA, 14 nt, Artificial Sequence
  Description of Artificial Sequence: Synthetic oligonucleotide
cccuuggagagggu

SEQ ID NO: 34091 - RNA, 14 nt, Artificial Sequence
  Description of Artificial Sequence: Synthetic oligonucleotide
acccuuggagaggg

SEQ ID NO: 34092 - RNA, 14 nt, Artificial Sequence
  Description of Artificial Sequence: Synthetic oligonucleotide
uacccuuggagagg

SEQ ID NO: 34093 - RNA, 14 nt, Artificial Sequence
  Description of Artificial Sequence: Synthetic oligonucleotide
guacccuuggagag

SEQ ID NO: 34094 - RNA, 14 nt, Artificial Sequence
  Description of Artificial Sequence: Synthetic oligonucleotide
gguacccuuggaga

SEQ ID NO: 34095 - RNA, 14 nt, Artificial Sequence
  Description of Artificial Sequence: Synthetic oligonucleotide
cgguacccuuggag

SEQ ID NO: 34096 - RNA, 14 nt, Artificial Sequence
  Description of Artificial Sequence: Synthetic oligonucleotide
gcgguacccuugga

SEQ ID NO: 34097 - RNA, 14 nt, Artificial Sequence
  Description of Artificial Sequence: Synthetic oligonucleotide
cgcgguacccuugg

SEQ ID NO: 34098 - RNA, 14 nt, Artificial Sequence
  Description of Artificial Sequence: Synthetic oligonucleotide
acgcgguacccuug

SEQ ID NO: 34099 - RNA, 14 nt, Artificial Sequence
  Description of Artificial Sequence: Synthetic oligonucleotide
gacgcgguacccuu

SEQ ID NO: 34100 - RNA, 14 nt, Artificial Sequence
  Description of Artificial Sequence: Synthetic oligonucleotide
cgacgcgguacccu

SEQ ID NO: 34101 - RNA, 14 nt, Artificial Sequence
  Description of Artificial Sequence: Synthetic oligonucleotide
ucgacgcgguaccc

SEQ ID NO: 34102 - RNA, 14 nt, Artificial Sequence
  Description of Artificial Sequence: Synthetic oligonucleotide
aucgacgcgguacc

SEQ ID NO: 34103 - RNA, 14 nt, Artificial Sequence
  Description of Artificial Sequence: Synthetic oligonucleotide
caucgacgcgguac

SEQ ID NO: 34104 - RNA, 14 nt, Artificial Sequence
  Description of Artificial Sequence: Synthetic oligonucleotide
gcaucgacgcggua

SEQ ID NO: 34105 - RNA, 14 nt, Artificial Sequence
  Description of Artificial Sequence: Synthetic oligonucleotide
agcaucgacgcggu

SEQ ID NO: 34106 - RNA, 14 nt, Artificial Sequence
  Description of Artificial Sequence: Synthetic oligonucleotide
uagcaucgacgcgg

SEQ ID NO: 34107 - RNA, 14 nt, Artificial Sequence
  Description of Artificial Sequence: Synthetic oligonucleotide
auagcaucgacgcg

SEQ ID NO: 34108 - RNA, 14 nt, Artificial Sequence
  Description of Artificial Sequence: Synthetic oligonucleotide
cauagcaucgacgc

SEQ ID NO: 34109 - RNA, 14 nt, Artificial Sequence
  Description of Artificial Sequence: Synthetic oligonucleotide
acauagcaucgacg

SEQ ID NO: 34110 - RNA, 14 nt, Artificial Sequence
  Description of Artificial Sequence: Synthetic oligonucleotide
cacauagcaucgac

SEQ ID NO: 34111 - RNA, 14 nt, Artificial Sequence
  Description of Artificial Sequence: Synthetic oligonucleotide
gcacauagcaucga

SEQ ID NO: 34112 - RNA, 14 nt, Artificial Sequence
  Description of Artificial Sequence: Synthetic oligonucleotide
agcacauagcaucg

SEQ ID NO: 34113 - RNA, 14 nt, Artificial Sequence
  Description of Artificial Sequence: Synthetic oligonucleotide
gagcacauagcauc

SEQ ID NO: 34114 - RNA, 14 nt, Artificial Sequence
  Description of Artificial Sequence: Synthetic oligonucleotide
ugagcacauagcau

SEQ ID NO: 34115 - RNA, 14 nt, Artificial Sequence
  Description of Artificial Sequence: Synthetic oligonucleotide
cugagcacauagca

SEQ ID NO: 34116 - RNA, 14 nt, Artificial Sequence
  Description of Artificial Sequence: Synthetic oligonucleotide
acugagcacauagc

SEQ ID NO: 34117 - RNA, 14 nt, Artificial Sequence
  Description of Artificial Sequence: Synthetic oligonucleotide
aacugagcacauag

SEQ ID NO: 34118 - RNA, 14 nt, Artificial Sequence
  Description of Artificial Sequence: Synthetic oligonucleotide
gaacugagcacaua

SEQ ID NO: 34119 - RNA, 14 nt, Artificial Sequence
  Description of Artificial Sequence: Synthetic oligonucleotide
agaacugagcacau

SEQ ID NO: 34120 - RNA, 14 nt, Artificial Sequence
  Description of Artificial Sequence: Synthetic oligonucleotide
uagaacugagcaca

SEQ ID NO: 34121 - RNA, 14 nt, Artificial Sequence
  Description of Artificial Sequence: Synthetic oligonucleotide
cuagaacugagcac

SEQ ID NO: 34122 - RNA, 14 nt, Artificial Sequence
  Description of Artificial Sequence: Synthetic oligonucleotide
acuagaacugagca

SEQ ID NO: 34123 - RNA, 14 nt, Artificial Sequence
  Description of Artificial Sequence: Synthetic oligonucleotide
gacuagaacugagc

SEQ ID NO: 34124 - RNA, 14 nt, Artificial Sequence
  Description of Artificial Sequence: Synthetic oligonucleotide
ugacuagaacugag

SEQ ID NO: 34125 - RNA, 14 nt, Artificial Sequence
  Description of Artificial Sequence: Synthetic oligonucleotide
cugacuagaacuga

SEQ ID NO: 34126 - RNA, 14 nt, Artificial Sequence
  Description of Artificial Sequence: Synthetic oligonucleotide
ucugacuagaacug

SEQ ID NO: 34127 - RNA, 14 nt, Artificial Sequence
  Description of Artificial Sequence: Synthetic oligonucleotide
uucugacuagaacu

SEQ ID NO: 34128 - RNA, 14 nt, Artificial Sequence
  Description of Artificial Sequence: Synthetic oligonucleotide
auucugacuagaac

SEQ ID NO: 34129 - RNA, 14 nt, Artificial Sequence
  Description of Artificial Sequence: Synthetic oligonucleotide
uauucugacuagaa

SEQ ID NO: 34130 - RNA, 14 nt, Artificial Sequence
  Description of Artificial Sequence: Synthetic oligonucleotide
uuauucugacuaga

SEQ ID NO: 34131 - RNA, 14 nt, Artificial Sequence
  Description of Artificial Sequence: Synthetic oligonucleotide
auuauucugacuag

SEQ ID NO: 34132 - RNA, 14 nt, Artificial Sequence
  Description of Artificial Sequence: Synthetic oligonucleotide
gauuauucugacua

SEQ ID NO: 34133 - RNA, 14 nt, Artificial Sequence
  Description of Artificial Sequence: Synthetic oligonucleotide
agauuauucugacu

SEQ ID NO: 34134 - RNA, 14 nt, Artificial Sequence
  Description of Artificial Sequence: Synthetic oligonucleotide
aagauuauucugac

SEQ ID NO: 34135 - RNA, 14 nt, Artificial Sequence
  Description of Artificial Sequence: Synthetic oligonucleotide
caagauuauucuga

SEQ ID NO: 34136 - RNA, 14 nt, Artificial Sequence
  Description of Artificial Sequence: Synthetic oligonucleotide
gcaagauuauucug

SEQ ID NO: 34137 - RNA, 14 nt, Artificial Sequence
  Description of Artificial Sequence: Synthetic oligonucleotide
agcaagauuauucu

SEQ ID NO: 34138 - RNA, 14 nt, Artificial Sequence
  Description of Artificial Sequence: Synthetic oligonucleotide
gagcaagauuauuc

SEQ ID NO: 34139 - RNA, 14 nt, Artificial Sequence
  Description of Artificial Sequence: Synthetic oligonucleotide
ugagcaagauuauu

SEQ ID NO: 34140 - RNA, 14 nt, Artificial Sequence
  Description of Artificial Sequence: Synthetic oligonucleotide
augagcaagauuau

SEQ ID NO: 34141 - RNA, 14 nt, Artificial Sequence
  Description of Artificial Sequence: Synthetic oligonucleotide
gaugagcaagauua

SEQ ID NO: 34142 - RNA, 14 nt, Artificial Sequence
  Description of Artificial Sequence: Synthetic oligonucleotide
ggaugagcaagauu

SEQ ID NO: 34143 - RNA, 14 nt, Artificial Sequence
  Description of Artificial Sequence: Synthetic oligonucleotide
aggaugagcaagau

SEQ ID NO: 34144 - RNA, 14 nt, Artificial Sequence
  Description of Artificial Sequence: Synthetic oligonucleotide
gaggaugagcaaga

SEQ ID NO: 34145 - RNA, 14 nt, Artificial Sequence
  Description of Artificial Sequence: Synthetic oligonucleotide
ggaggaugagcaag

SEQ ID NO: 34146 - RNA, 14 nt, Artificial Sequence
  Description of Artificial Sequence: Synthetic oligonucleotide
uggaggaugagcaa

SEQ ID NO: 34147 - RNA, 14 nt, Artificial Sequence
  Description of Artificial Sequence: Synthetic oligonucleotide
cuggaggaugagca

SEQ ID NO: 34148 - RNA, 14 nt, Artificial Sequence
  Description of Artificial Sequence: Synthetic oligonucleotide
gcuggaggaugagc

SEQ ID NO: 34149 - RNA, 14 nt, Artificial Sequence
  Description of Artificial Sequence: Synthetic oligonucleotide
agcuggaggaugag

SEQ ID NO: 34150 - RNA, 14 nt, Artificial Sequence
  Description of Artificial Sequence: Synthetic oligonucleotide
gagcuggaggauga

SEQ ID NO: 34151 - RNA, 14 nt, Artificial Sequence
  Description of Artificial Sequence: Synthetic oligonucleotide
ggagcuggaggaug

SEQ ID NO: 34152 - RNA, 14 nt, Artificial Sequence
  Description of Artificial Sequence: Synthetic oligonucleotide
gggagcuggaggau

SEQ ID NO: 34153 - RNA, 14 nt, Artificial Sequence
  Description of Artificial Sequence: Synthetic oligonucleotide
ggggagcuggagga

SEQ ID NO: 34154 - RNA, 14 nt, Artificial Sequence
  Description of Artificial Sequence: Synthetic oligonucleotide
gggggagcuggagg

SEQ ID NO: 34155 - RNA, 14 nt, Artificial Sequence
  Description of Artificial Sequence: Synthetic oligonucleotide
agggggagcuggag

SEQ ID NO: 34156 - RNA, 14 nt, Artificial Sequence
  Description of Artificial Sequence: Synthetic oligonucleotide
cagggggagcugga

SEQ ID NO: 34157 - RNA, 14 nt, Artificial Sequence
  Description of Artificial Sequence: Synthetic oligonucleotide
acagggggagcugg

SEQ ID NO: 34158 - RNA, 14 nt, Artificial Sequence
  Description of Artificial Sequence: Synthetic oligonucleotide
aacagggggagcug

SEQ ID NO: 34159 - RNA, 14 nt, Artificial Sequence
  Description of Artificial Sequence: Synthetic oligonucleotide
gaacagggggagcu

SEQ ID NO: 34160 - DNA, 14 bp, Artificial Sequence
  Description of Artificial Sequence: Synthetic oligonucleotide
ggaacagggggagc

SEQ ID NO: 34161 - RNA, 14 nt, Artificial Sequence
  Description of Artificial Sequence: Synthetic oligonucleotide
uggaacagggggag

SEQ ID NO: 34162 - RNA, 14 nt, Artificial Sequence
  Description of Artificial Sequence: Synthetic oligonucleotide
guggaacaggggga

SEQ ID NO: 34163 - RNA, 14 nt, Artificial Sequence
  Description of Artificial Sequence: Synthetic oligonucleotide
gguggaacaggggg

SEQ ID NO: 34164 - RNA, 14 nt, Artificial Sequence
  Description of Artificial Sequence: Synthetic oligonucleotide
ugguggaacagggg

SEQ ID NO: 34165 - RNA, 14 nt, Artificial Sequence
  Description of Artificial Sequence: Synthetic oligonucleotide
uugguggaacaggg

SEQ ID NO: 34166 - RNA, 14 nt, Artificial Sequence
  Description of Artificial Sequence: Synthetic oligonucleotide
cuugguggaacagg

SEQ ID NO: 34167 - RNA, 14 nt, Artificial Sequence
  Description of Artificial Sequence: Synthetic oligonucleotide
ccuugguggaacag

SEQ ID NO: 34168 - RNA, 14 nt, Artificial Sequence
  Description of Artificial Sequence: Synthetic oligonucleotide
gccuugguggaaca

SEQ ID NO: 34169 - RNA, 14 nt, Artificial Sequence
  Description of Artificial Sequence: Synthetic oligonucleotide
ugccuugguggaac

SEQ ID NO: 34170 - RNA, 14 nt, Artificial Sequence
  Description of Artificial Sequence: Synthetic oligonucleotide
cugccuugguggaa

SEQ ID NO: 34171 - RNA, 14 nt, Artificial Sequence
  Description of Artificial Sequence: Synthetic oligonucleotide
ucugccuuggugga

SEQ ID NO: 34172 - RNA, 14 nt, Artificial Sequence
  Description of Artificial Sequence: Synthetic oligonucleotide
uucugccuuggugg

SEQ ID NO: 34173 - RNA, 14 nt, Artificial Sequence
  Description of Artificial Sequence: Synthetic oligonucleotide
auucugccuuggug

SEQ ID NO: 34174 - RNA, 14 nt, Artificial Sequence
  Description of Artificial Sequence: Synthetic oligonucleotide
aauucugccuuggu

SEQ ID NO: 34175 - RNA, 14 nt, Artificial Sequence
  Description of Artificial Sequence: Synthetic oligonucleotide
gaauucugccuugg

SEQ ID NO: 34176 - RNA, 14 nt, Artificial Sequence
  Description of Artificial Sequence: Synthetic oligonucleotide
ugaauucugccuug

SEQ ID NO: 34177 - RNA, 14 nt, Artificial Sequence
  Description of Artificial Sequence: Synthetic oligonucleotide
uugaauucugccuu

SEQ ID NO: 34178 - RNA, 14 nt, Artificial Sequence
  Description of Artificial Sequence: Synthetic oligonucleotide
cuugaauucugccu

SEQ ID NO: 34179 - RNA, 14 nt, Artificial Sequence
  Description of Artificial Sequence: Synthetic oligonucleotide
gcuugaauucugcc

SEQ ID NO: 34180 - RNA, 14 nt, Artificial Sequence
  Description of Artificial Sequence: Synthetic oligonucleotide
ggcuugaauucugc

SEQ ID NO: 34181 - RNA, 14 nt, Artificial Sequence
  Description of Artificial Sequence: Synthetic oligonucleotide
gggcuugaauucug

SEQ ID NO: 34182 - RNA, 14 nt, Artificial Sequence
  Description of Artificial Sequence: Synthetic oligonucleotide
agggcuugaauucu

SEQ ID NO: 34183 - RNA, 14 nt, Artificial Sequence
  Description of Artificial Sequence: Synthetic oligonucleotide
gagggcuugaauuc

SEQ ID NO: 34184 - RNA, 14 nt, Artificial Sequence
  Description of Artificial Sequence: Synthetic oligonucleotide
ugagggcuugaauu

SEQ ID NO: 34185 - RNA, 14 nt, Artificial Sequence
  Description of Artificial Sequence: Synthetic oligonucleotide
augagggcuugaau

SEQ ID NO: 34186 - RNA, 14 nt, Artificial Sequence
  Description of Artificial Sequence: Synthetic oligonucleotide
gaugagggcuugaa

SEQ ID NO: 34187 - RNA, 14 nt, Artificial Sequence
  Description of Artificial Sequence: Synthetic oligonucleotide
agaugagggcuuga

SEQ ID NO: 34188 - RNA, 14 nt, Artificial Sequence
  Description of Artificial Sequence: Synthetic oligonucleotide
cagaugagggcuug

SEQ ID NO: 34189 - RNA, 14 nt, Artificial Sequence
  Description of Artificial Sequence: Synthetic oligonucleotide
gcagaugagggcuu

SEQ ID NO: 34190 - RNA, 14 nt, Artificial Sequence
  Description of Artificial Sequence: Synthetic oligonucleotide
ggcagaugagggcu

SEQ ID NO: 34191 - RNA, 14 nt, Artificial Sequence
  Description of Artificial Sequence: Synthetic oligonucleotide
uggcagaugagggc

SEQ ID NO: 34192 - RNA, 14 nt, Artificial Sequence
  Description of Artificial Sequence: Synthetic oligonucleotide
uuggcagaugaggg

SEQ ID NO: 34193 - RNA, 14 nt, Artificial Sequence
  Description of Artificial Sequence: Synthetic oligonucleotide
uuuggcagaugagg

SEQ ID NO: 34194 - RNA, 14 nt, Artificial Sequence
  Description of Artificial Sequence: Synthetic oligonucleotide
uuuuggcagaugag

SEQ ID NO: 34195 - RNA, 14 nt, Artificial Sequence
  Description of Artificial Sequence: Synthetic oligonucleotide
guuuuggcagauga

SEQ ID NO: 34196 - RNA, 14 nt, Artificial Sequence
  Description of Artificial Sequence: Synthetic oligonucleotide
aguuuuggcagaug

SEQ ID NO: 34197 - RNA, 14 nt, Artificial Sequence
  Description of Artificial Sequence: Synthetic oligonucleotide
caguuuuggcagau

SEQ ID NO: 34198 - RNA, 14 nt, Artificial Sequence
  Description of Artificial Sequence: Synthetic oligonucleotide
gcaguuuuggcaga

SEQ ID NO: 34199 - RNA, 14 nt, Artificial Sequence
  Description of Artificial Sequence: Synthetic oligonucleotide
ggcaguuuuggcag

SEQ ID NO: 34200 - RNA, 14 nt, Artificial Sequence
  Description of Artificial Sequence: Synthetic oligonucleotide
uggcaguuuuggca

SEQ ID NO: 34201 - RNA, 14 nt, Artificial Sequence
  Description of Artificial Sequence: Synthetic oligonucleotide
guggcaguuuuggc

SEQ ID NO: 34202 - RNA, 14 nt, Artificial Sequence
  Description of Artificial Sequence: Synthetic oligonucleotide
gguggcaguuuugg

SEQ ID NO: 34203 - RNA, 14 nt, Artificial Sequence
  Description of Artificial Sequence: Synthetic oligonucleotide
ugguggcaguuuug

SEQ ID NO: 34204 - RNA, 14 nt, Artificial Sequence
  Description of Artificial Sequence: Synthetic oligonucleotide
uugguggcaguuuu

SEQ ID NO: 34205 - RNA, 14 nt, Artificial Sequence
  Description of Artificial Sequence: Synthetic oligonucleotide
uuugguggcaguuu

SEQ ID NO: 34206 - RNA, 14 nt, Artificial Sequence
  Description of Artificial Sequence: Synthetic oligonucleotide
cuuugguggcaguu

SEQ ID NO: 34207 - RNA, 14 nt, Artificial Sequence
  Description of Artificial Sequence: Synthetic oligonucleotide
ucuuugguggcagu

SEQ ID NO: 34208 - RNA, 14 nt, Artificial Sequence
  Description of Artificial Sequence: Synthetic oligonucleotide
gucuuugguggcag

SEQ ID NO: 34209 - RNA, 14 nt, Artificial Sequence
  Description of Artificial Sequence: Synthetic oligonucleotide
agucuuugguggca

SEQ ID NO: 34210 - RNA, 14 nt, Artificial Sequence
  Description of Artificial Sequence: Synthetic oligonucleotide
aagucuuugguggc

SEQ ID NO: 34211 - RNA, 14 nt, Artificial Sequence
  Description of Artificial Sequence: Synthetic oligonucleotide
uaagucuuuggugg

SEQ ID NO: 34212 - RNA, 14 nt, Artificial Sequence
  Description of Artificial Sequence: Synthetic oligonucleotide
guaagucuuuggug

SEQ ID NO: 34213 - RNA, 14 nt, Artificial Sequence
  Description of Artificial Sequence: Synthetic oligonucleotide
uguaagucuuuggu

SEQ ID NO: 34214 - RNA, 14 nt, Artificial Sequence
  Description of Artificial Sequence: Synthetic oligonucleotide
uuguaagucuuugg

SEQ ID NO: 34215 - RNA, 14 nt, Artificial Sequence
  Description of Artificial Sequence: Synthetic oligonucleotide
uuuguaagucuuug

SEQ ID NO: 34216 - RNA, 14 nt, Artificial Sequence
  Description of Artificial Sequence: Synthetic oligonucleotide
guuuguaagucuuu

SEQ ID NO: 34217 - RNA, 14 nt, Artificial Sequence
  Description of Artificial Sequence: Synthetic oligonucleotide
cguuuguaagucuu

SEQ ID NO: 34218 - RNA, 14 nt, Artificial Sequence
  Description of Artificial Sequence: Synthetic oligonucleotide
ccguuuguaagucu

SEQ ID NO: 34219 - RNA, 14 nt, Artificial Sequence
  Description of Artificial Sequence: Synthetic oligonucleotide
cccguuuguaaguc

SEQ ID NO: 34220 - RNA, 14 nt, Artificial Sequence
  Description of Artificial Sequence: Synthetic oligonucleotide
ucccguuuguaagu

SEQ ID NO: 34221 - RNA, 14 nt, Artificial Sequence
  Description of Artificial Sequence: Synthetic oligonucleotide
cucccguuuguaag

SEQ ID NO: 34222 - RNA, 14 nt, Artificial Sequence
  Description of Artificial Sequence: Synthetic oligonucleotide
gcucccguuuguaa

SEQ ID NO: 34223 - RNA, 14 nt, Artificial Sequence
  Description of Artificial Sequence: Synthetic oligonucleotide
agcucccguuugua

SEQ ID NO: 34224 - RNA, 14 nt, Artificial Sequence
  Description of Artificial Sequence: Synthetic oligonucleotide
aagcucccguuugu

SEQ ID NO: 34225 - RNA, 14 nt, Artificial Sequence
  Description of Artificial Sequence: Synthetic oligonucleotide
aaagcucccguuug

SEQ ID NO: 34226 - RNA, 14 nt, Artificial Sequence
  Description of Artificial Sequence: Synthetic oligonucleotide
gaaagcucccguuu

SEQ ID NO: 34227 - RNA, 14 nt, Artificial Sequence
  Description of Artificial Sequence: Synthetic oligonucleotide
cgaaagcucccguu

SEQ ID NO: 34228 - RNA, 14 nt, Artificial Sequence
  Description of Artificial Sequence: Synthetic oligonucleotide
gcgaaagcucccgu

SEQ ID NO: 34229 - RNA, 14 nt, Artificial Sequence
  Description of Artificial Sequence: Synthetic oligonucleotide
ugcgaaagcucccg

SEQ ID NO: 34230 - RNA, 14 nt, Artificial Sequence
  Description of Artificial Sequence: Synthetic oligonucleotide
gugcgaaagcuccc

SEQ ID NO: 34231 - RNA, 14 nt, Artificial Sequence
  Description of Artificial Sequence: Synthetic oligonucleotide
ggugcgaaagcucc

SEQ ID NO: 34232 - RNA, 14 nt, Artificial Sequence
  Description of Artificial Sequence: Synthetic oligonucleotide
gggugcgaaagcuc

SEQ ID NO: 34233 - RNA, 14 nt, Artificial Sequence
  Description of Artificial Sequence: Synthetic oligonucleotide
ggggugcgaaagcu

SEQ ID NO: 34234 - RNA, 14 nt, Artificial Sequence
  Description of Artificial Sequence: Synthetic oligonucleotide
gggggugcgaaagc

SEQ ID NO: 34235 - RNA, 14 nt, Artificial Sequence
  Description of Artificial Sequence: Synthetic oligonucleotide
ggggggugcgaaag

SEQ ID NO: 34236 - RNA, 14 nt, Artificial Sequence
  Description of Artificial Sequence: Synthetic oligonucleotide
uggggggugcgaaa

SEQ ID NO: 34237 - RNA, 14 nt, Artificial Sequence
  Description of Artificial Sequence: Synthetic oligonucleotide
auggggggugcgaa

SEQ ID NO: 34238 - RNA, 14 nt, Artificial Sequence
  Description of Artificial Sequence: Synthetic oligonucleotide
aauggggggugcga

SEQ ID NO: 34239 - RNA, 14 nt, Artificial Sequence
  Description of Artificial Sequence: Synthetic oligonucleotide
caauggggggugcg

SEQ ID NO: 34240 - RNA, 14 nt, Artificial Sequence
  Description of Artificial Sequence: Synthetic oligonucleotide
acaauggggggugc

SEQ ID NO: 34241 - RNA, 14 nt, Artificial Sequence
  Description of Artificial Sequence: Synthetic oligonucleotide
uacaauggggggug

SEQ ID NO: 34242 - RNA, 14 nt, Artificial Sequence
  Description of Artificial Sequence: Synthetic oligonucleotide
guacaauggggggu

SEQ ID NO: 34243 - RNA, 14 nt, Artificial Sequence
  Description of Artificial Sequence: Synthetic oligonucleotide
uguacaaugggggg

SEQ ID NO: 34244 - RNA, 14 nt, Artificial Sequence
  Description of Artificial Sequence: Synthetic oligonucleotide
cuguacaauggggg

SEQ ID NO: 34245 - RNA, 14 nt, Artificial Sequence
  Description of Artificial Sequence: Synthetic oligonucleotide
ucuguacaaugggg

SEQ ID NO: 34246 - RNA, 14 nt, Artificial Sequence
  Description of Artificial Sequence: Synthetic oligonucleotide
gucuguacaauggg

SEQ ID NO: 34247 - RNA, 14 nt, Artificial Sequence
  Description of Artificial Sequence: Synthetic oligonucleotide
agucuguacaaugg

SEQ ID NO: 34248 - RNA, 14 nt, Artificial Sequence
  Description of Artificial Sequence: Synthetic oligonucleotide
cagucuguacaaug

SEQ ID NO: 34249 - RNA, 14 nt, Artificial Sequence
  Description of Artificial Sequence: Synthetic oligonucleotide
gcagucuguacaau

SEQ ID NO: 34250 - RNA, 14 nt, Artificial Sequence
  Description of Artificial Sequence: Synthetic oligonucleotide
ggcagucuguacaa

SEQ ID NO: 34251 - RNA, 14 nt, Artificial Sequence
  Description of Artificial Sequence: Synthetic oligonucleotide
aggcagucuguaca

SEQ ID NO: 34252 - RNA, 14 nt, Artificial Sequence
  Description of Artificial Sequence: Synthetic oligonucleotide
aaggcagucuguac

SEQ ID NO: 34253 - RNA, 14 nt, Artificial Sequence
  Description of Artificial Sequence: Synthetic oligonucleotide
aaaggcagucugua

SEQ ID NO: 34254 - RNA, 14 nt, Artificial Sequence
  Description of Artificial Sequence: Synthetic oligonucleotide
caaaggcagucugu

SEQ ID NO: 34255 - RNA, 14 nt, Artificial Sequence
  Description of Artificial Sequence: Synthetic oligonucleotide
gcaaaggcagucug

SEQ ID NO: 34256 - RNA, 14 nt, Artificial Sequence
  Description of Artificial Sequence: Synthetic oligonucleotide
agcaaaggcagucu

SEQ ID NO: 34257 - RNA, 14 nt, Artificial Sequence
  Description of Artificial Sequence: Synthetic oligonucleotide
uagcaaaggcaguc

SEQ ID NO: 34258 - RNA, 14 nt, Artificial Sequence
  Description of Artificial Sequence: Synthetic oligonucleotide
cuagcaaaggcagu

SEQ ID NO: 34259 - RNA, 14 nt, Artificial Sequence
  Description of Artificial Sequence: Synthetic oligonucleotide
ucuagcaaaggcag

SEQ ID NO: 34260 - RNA, 14 nt, Artificial Sequence
  Description of Artificial Sequence: Synthetic oligonucleotide
uucuagcaaaggca

SEQ ID NO: 34261 - RNA, 14 nt, Artificial Sequence
  Description of Artificial Sequence: Synthetic oligonucleotide
uuucuagcaaaggc

SEQ ID NO: 34262 - RNA, 14 nt, Artificial Sequence
  Description of Artificial Sequence: Synthetic oligonucleotide
uuuucuagcaaagg

SEQ ID NO: 34263 - RNA, 14 nt, Artificial Sequence
  Description of Artificial Sequence: Synthetic oligonucleotide
auuuucuagcaaag

SEQ ID NO: 34264 - RNA, 14 nt, Artificial Sequence
  Description of Artificial Sequence: Synthetic oligonucleotide
cauuuucuagcaaa

SEQ ID NO: 34265 - RNA, 14 nt, Artificial Sequence
  Description of Artificial Sequence: Synthetic oligonucleotide
gcauuuucuagcaa

SEQ ID NO: 34266 - RNA, 14 nt, Artificial Sequence
  Description of Artificial Sequence: Synthetic oligonucleotide
ugcauuuucuagca

SEQ ID NO: 34267 - RNA, 14 nt, Artificial Sequence
  Description of Artificial Sequence: Synthetic oligonucleotide
cugcauuuucuagc

SEQ ID NO: 34268 - RNA, 14 nt, Artificial Sequence
  Description of Artificial Sequence: Synthetic oligonucleotide
ucugcauuuucuag

SEQ ID NO: 34269 - RNA, 14 nt, Artificial Sequence
  Description of Artificial Sequence: Synthetic oligonucleotide
uucugcauuuucua

SEQ ID NO: 34270 - RNA, 14 nt, Artificial Sequence
  Description of Artificial Sequence: Synthetic oligonucleotide
uuucugcauuuucu

SEQ ID NO: 34271 - RNA, 14 nt, Artificial Sequence
  Description of Artificial Sequence: Synthetic oligonucleotide
guuucugcauuuuc

SEQ ID NO: 34272 - RNA, 14 nt, Artificial Sequence
  Description of Artificial Sequence: Synthetic oligonucleotide
aguuucugcauuuu

SEQ ID NO: 34273 - RNA, 14 nt, Artificial Sequence
  Description of Artificial Sequence: Synthetic oligonucleotide
gaguuucugcauuu

SEQ ID NO: 34274 - RNA, 14 nt, Artificial Sequence
  Description of Artificial Sequence: Synthetic oligonucleotide
ggaguuucugcauu

SEQ ID NO: 34275 - RNA, 14 nt, Artificial Sequence
  Description of Artificial Sequence: Synthetic oligonucleotide
gggaguuucugcau

SEQ ID NO: 34276 - RNA, 14 nt, Artificial Sequence
  Description of Artificial Sequence: Synthetic oligonucleotide
ggggaguuucugca

SEQ ID NO: 34277 - RNA, 14 nt, Artificial Sequence
  Description of Artificial Sequence: Synthetic oligonucleotide
uggggaguuucugc

SEQ ID NO: 34278 - RNA, 14 nt, Artificial Sequence
  Description of Artificial Sequence: Synthetic oligonucleotide
uuggggaguuucug

SEQ ID NO: 34279 - RNA, 14 nt, Artificial Sequence
  Description of Artificial Sequence: Synthetic oligonucleotide
auuggggaguuucu

SEQ ID NO: 34280 - RNA, 14 nt, Artificial Sequence
  Description of Artificial Sequence: Synthetic oligonucleotide
cauuggggaguuuc

SEQ ID NO: 34281 - RNA, 14 nt, Artificial Sequence
  Description of Artificial Sequence: Synthetic oligonucleotide
ucauuggggaguuu

SEQ ID NO: 34282 - RNA, 14 nt, Artificial Sequence
  Description of Artificial Sequence: Synthetic oligonucleotide
gucauuggggaguu

SEQ ID NO: 34283 - RNA, 14 nt, Artificial Sequence
  Description of Artificial Sequence: Synthetic oligonucleotide
ggucauuggggagu

SEQ ID NO: 34284 - RNA, 14 nt, Artificial Sequence
  Description of Artificial Sequence: Synthetic oligonucleotide
aggucauuggggag

SEQ ID NO: 34285 - RNA, 14 nt, Artificial Sequence
  Description of Artificial Sequence: Synthetic oligonucleotide
aaggucauugggga

SEQ ID NO: 34286 - RNA, 14 nt, Artificial Sequence
  Description of Artificial Sequence: Synthetic oligonucleotide
uaaggucauugggg

SEQ ID NO: 34287 - RNA, 14 nt, Artificial Sequence
  Description of Artificial Sequence: Synthetic oligonucleotide
cuaaggucauuggg

SEQ ID NO: 34288 - RNA, 14 nt, Artificial Sequence
  Description of Artificial Sequence: Synthetic oligonucleotide
gcuaaggucauugg

SEQ ID NO: 34289 - RNA, 14 nt, Artificial Sequence
  Description of Artificial Sequence: Synthetic oligonucleotide
ggcuaaggucauug

SEQ ID NO: 34290 - RNA, 14 nt, Artificial Sequence
  Description of Artificial Sequence: Synthetic oligonucleotide
uggcuaaggucauu

SEQ ID NO: 34291 - RNA, 14 nt, Artificial Sequence
  Description of Artificial Sequence: Synthetic oligonucleotide
auggcuaaggucau

SEQ ID NO: 34292 - RNA, 14 nt, Artificial Sequence
  Description of Artificial Sequence: Synthetic oligonucleotide
uauggcuaagguca

SEQ ID NO: 34293 - RNA, 14 nt, Artificial Sequence
  Description of Artificial Sequence: Synthetic oligonucleotide
auauggcuaagguc

SEQ ID NO: 34294 - RNA, 14 nt, Artificial Sequence
  Description of Artificial Sequence: Synthetic oligonucleotide
cauauggcuaaggu

SEQ ID NO: 34295 - RNA, 14 nt, Artificial Sequence
  Description of Artificial Sequence: Synthetic oligonucleotide
acauauggcuaagg

SEQ ID NO: 34296 - RNA, 14 nt, Artificial Sequence
  Description of Artificial Sequence: Synthetic oligonucleotide
uacauauggcuaag

SEQ ID NO: 34297 - RNA, 14 nt, Artificial Sequence
  Description of Artificial Sequence: Synthetic oligonucleotide
cuacauauggcuaa

SEQ ID NO: 34298 - RNA, 14 nt, Artificial Sequence
  Description of Artificial Sequence: Synthetic oligonucleotide
acuacauauggcua

SEQ ID NO: 34299 - RNA, 14 nt, Artificial Sequence
  Description of Artificial Sequence: Synthetic oligonucleotide
gacuacauauggcu

SEQ ID NO: 34300 - RNA, 14 nt, Artificial Sequence
  Description of Artificial Sequence: Synthetic oligonucleotide
ugacuacauauggc

SEQ ID NO: 34301 - RNA, 14 nt, Artificial Sequence
  Description of Artificial Sequence: Synthetic oligonucleotide
augacuacauaugg

SEQ ID NO: 34302 - RNA, 14 nt, Artificial Sequence
  Description of Artificial Sequence: Synthetic oligonucleotide
aaugacuacauaug

SEQ ID NO: 34303 - RNA, 14 nt, Artificial Sequence
  Description of Artificial Sequence: Synthetic oligonucleotide
caaugacuacauau

SEQ ID NO: 34304 - RNA, 14 nt, Artificial Sequence
  Description of Artificial Sequence: Synthetic oligonucleotide
ucaaugacuacaua

SEQ ID NO: 34305 - RNA, 14 nt, Artificial Sequence
  Description of Artificial Sequence: Synthetic oligonucleotide
gucaaugacuacau

SEQ ID NO: 34306 - RNA, 14 nt, Artificial Sequence
  Description of Artificial Sequence: Synthetic oligonucleotide
ugucaaugacuaca

SEQ ID NO: 34307 - RNA, 14 nt, Artificial Sequence
  Description of Artificial Sequence: Synthetic oligonucleotide
gugucaaugacuac

SEQ ID NO: 34308 - RNA, 14 nt, Artificial Sequence
  Description of Artificial Sequence: Synthetic oligonucleotide
agugucaaugacua

SEQ ID NO: 34309 - RNA, 14 nt, Artificial Sequence
  Description of Artificial Sequence: Synthetic oligonucleotide
cagugucaaugacu

SEQ ID NO: 34310 - RNA, 14 nt, Artificial Sequence
  Description of Artificial Sequence: Synthetic oligonucleotide
ccagugucaaugac

SEQ ID NO: 34311 - RNA, 14 nt, Artificial Sequence
  Description of Artificial Sequence: Synthetic oligonucleotide
uccagugucaauga

SEQ ID NO: 34312 - RNA, 14 nt, Artificial Sequence
  Description of Artificial Sequence: Synthetic oligonucleotide
uuccagugucaaug

SEQ ID NO: 34313 - RNA, 14 nt, Artificial Sequence
  Description of Artificial Sequence: Synthetic oligonucleotide
auuccagugucaau

SEQ ID NO: 34314 - RNA, 14 nt, Artificial Sequence
  Description of Artificial Sequence: Synthetic oligonucleotide
cauuccagugucaa

SEQ ID NO: 34315 - RNA, 14 nt, Artificial Sequence
  Description of Artificial Sequence: Synthetic oligonucleotide
ccauuccaguguca

SEQ ID NO: 34316 - RNA, 14 nt, Artificial Sequence
  Description of Artificial Sequence: Synthetic oligonucleotide
accauuccaguguc

SEQ ID NO: 34317 - RNA, 14 nt, Artificial Sequence
  Description of Artificial Sequence: Synthetic oligonucleotide
uaccauuccagugu

SEQ ID NO: 34318 - RNA, 14 nt, Artificial Sequence
  Description of Artificial Sequence: Synthetic oligonucleotide
auaccauuccagug

SEQ ID NO: 34319 - RNA, 14 nt, Artificial Sequence
  Description of Artificial Sequence: Synthetic oligonucleotide
aauaccauuccagu

SEQ ID NO: 34320 - RNA, 14 nt, Artificial Sequence
  Description of Artificial Sequence: Synthetic oligonucleotide
aaauaccauuccag

SEQ ID NO: 34321 - RNA, 14 nt, Artificial Sequence
  Description of Artificial Sequence: Synthetic oligonucleotide
caaauaccauucca

SEQ ID NO: 34322 - RNA, 14 nt, Artificial Sequence
  Description of Artificial Sequence: Synthetic oligonucleotide
acaaauaccauucc

SEQ ID NO: 34323 - RNA, 14 nt, Artificial Sequence
  Description of Artificial Sequence: Synthetic oligonucleotide
uacaaauaccauuc

SEQ ID NO: 34324 - RNA, 14 nt, Artificial Sequence
  Description of Artificial Sequence: Synthetic oligonucleotide
uuacaaauaccauu

SEQ ID NO: 34325 - RNA, 14 nt, Artificial Sequence
  Description of Artificial Sequence: Synthetic oligonucleotide
uuuacaaauaccau

SEQ ID NO: 34326 - RNA, 14 nt, Artificial Sequence
  Description of Artificial Sequence: Synthetic oligonucleotide
cuuuacaaauacca

SEQ ID NO: 34327 - RNA, 14 nt, Artificial Sequence
  Description of Artificial Sequence: Synthetic oligonucleotide
acuuuacaaauacc

SEQ ID NO: 34328 - RNA, 14 nt, Artificial Sequence
  Description of Artificial Sequence: Synthetic oligonucleotide
aacuuuacaaauac

SEQ ID NO: 34329 - RNA, 14 nt, Artificial Sequence
  Description of Artificial Sequence: Synthetic oligonucleotide
aaacuuuacaaaua

SEQ ID NO: 34330 - RNA, 14 nt, Artificial Sequence
  Description of Artificial Sequence: Synthetic oligonucleotide
aaaacuuuacaaau

SEQ ID NO: 34331 - RNA, 14 nt, Artificial Sequence
  Description of Artificial Sequence: Synthetic oligonucleotide
aaaaacuuuacaaa

SEQ ID NO: 34332 - RNA, 14 nt, Artificial Sequence
  Description of Artificial Sequence: Synthetic oligonucleotide
aaaaaacuuuacaa

SEQ ID NO: 34333 - RNA, 14 nt, Artificial Sequence
  Description of Artificial Sequence: Synthetic oligonucleotide
aaaaaaacuuuaca

SEQ ID NO: 34334 - RNA, 14 nt, Artificial Sequence
  Description of Artificial Sequence: Synthetic oligonucleotide
aaaaaaaacuuuac

SEQ ID NO: 34335 - RNA, 14 nt, Artificial Sequence
  Description of Artificial Sequence: Synthetic oligonucleotide
aaaaaaaaacuuua

SEQ ID NO: 34336 - RNA, 14 nt, Artificial Sequence
  Description of Artificial Sequence: Synthetic oligonucleotide
aaaaaaaaaacuuu

SEQ ID NO: 34337 - RNA, 14 nt, Artificial Sequence
  Description of Artificial Sequence: Synthetic oligonucleotide
uaaaaaaaaaacuu

SEQ ID NO: 34338 - RNA, 14 nt, Artificial Sequence
  Description of Artificial Sequence: Synthetic oligonucleotide
uuaaaaaaaaaacu

SEQ ID NO: 34339 - RNA, 14 nt, Artificial Sequence
  Description of Artificial Sequence: Synthetic oligonucleotide
auuaaaaaaaaaac

SEQ ID NO: 34340 - RNA, 14 nt, Artificial Sequence
  Description of Artificial Sequence: Synthetic oligonucleotide
aauuaaaaaaaaaa

SEQ ID NO: 34341 - RNA, 14 nt, Artificial Sequence
  Description of Artificial Sequence: Synthetic oligonucleotide
aaauuaaaaaaaaa

SEQ ID NO: 34342 - RNA, 14 nt, Artificial Sequence
  Description of Artificial Sequence: Synthetic oligonucleotide
uaaauuaaaaaaaa

SEQ ID NO: 34343 - RNA, 14 nt, Artificial Sequence
  Description of Artificial Sequence: Synthetic oligonucleotide
auaaauuaaaaaaa

SEQ ID NO: 34344 - RNA, 14 nt, Artificial Sequence
  Description of Artificial Sequence: Synthetic oligonucleotide
aauaaauuaaaaaa

SEQ ID NO: 34345 - RNA, 14 nt, Artificial Sequence
  Description of Artificial Sequence: Synthetic oligonucleotide
gaauaaauuaaaaa

SEQ ID NO: 34346 - RNA, 14 nt, Artificial Sequence
  Description of Artificial Sequence: Synthetic oligonucleotide
ugaauaaauuaaaa

SEQ ID NO: 34347 - RNA, 14 nt, Artificial Sequence
  Description of Artificial Sequence: Synthetic oligonucleotide
uugaauaaauuaaa

SEQ ID NO: 34348 - RNA, 14 nt, Artificial Sequence
  Description of Artificial Sequence: Synthetic oligonucleotide
uuugaauaaauuaa

SEQ ID NO: 34349 - RNA, 14 nt, Artificial Sequence
  Description of Artificial Sequence: Synthetic oligonucleotide
uuuugaauaaauua

SEQ ID NO: 34350 - RNA, 14 nt, Artificial Sequence
  Description of Artificial Sequence: Synthetic oligonucleotide
uuuuugaauaaauu

SEQ ID NO: 34351 - RNA, 14 nt, Artificial Sequence
  Description of Artificial Sequence: Synthetic oligonucleotide
uuuuuugaauaaau

SEQ ID NO: 34352 - RNA, 14 nt, Artificial Sequence
  Description of Artificial Sequence: Synthetic oligonucleotide
uuuuuuugaauaaa

SEQ ID NO: 34353 - RNA, 14 nt, Artificial Sequence
  Description of Artificial Sequence: Synthetic oligonucleotide
cuuuuuuugaauaa

SEQ ID NO: 34354 - RNA, 14 nt, Artificial Sequence
  Description of Artificial Sequence: Synthetic oligonucleotide
ucuuuuuuugaaua

SEQ ID NO: 34355 - RNA, 14 nt, Artificial Sequence
  Description of Artificial Sequence: Synthetic oligonucleotide
gucuuuuuuugaau

SEQ ID NO: 34356 - RNA, 14 nt, Artificial Sequence
  Description of Artificial Sequence: Synthetic oligonucleotide
ugucuuuuuuugaa

SEQ ID NO: 34357 - RNA, 14 nt, Artificial Sequence
  Description of Artificial Sequence: Synthetic oligonucleotide
augucuuuuuuuga

SEQ ID NO: 34358 - RNA, 14 nt, Artificial Sequence
  Description of Artificial Sequence: Synthetic oligonucleotide
uaugucuuuuuuug

SEQ ID NO: 34359 - RNA, 14 nt, Artificial Sequence
  Description of Artificial Sequence: Synthetic oligonucleotide
cuaugucuuuuuuu

SEQ ID NO: 34360 - RNA, 14 nt, Artificial Sequence
  Description of Artificial Sequence: Synthetic oligonucleotide
acuaugucuuuuuu

SEQ ID NO: 34361 - RNA, 14 nt, Artificial Sequence
  Description of Artificial Sequence: Synthetic oligonucleotide
uacuaugucuuuuu

SEQ ID NO: 34362 - RNA, 14 nt, Artificial Sequence
  Description of Artificial Sequence: Synthetic oligonucleotide
auacuaugucuuuu

SEQ ID NO: 34363 - RNA, 14 nt, Artificial Sequence
  Description of Artificial Sequence: Synthetic oligonucleotide
aauacuaugucuuu

SEQ ID NO: 34364 - RNA, 14 nt, Artificial Sequence
  Description of Artificial Sequence: Synthetic oligonucleotide
aaauacuaugucuu

SEQ ID NO: 34365 - RNA, 14 nt, Artificial Sequence
  Description of Artificial Sequence: Synthetic oligonucleotide
aaaauacuaugucu

SEQ ID NO: 34366 - RNA, 14 nt, Artificial Sequence
  Description of Artificial Sequence: Synthetic oligonucleotide
uaaaauacuauguc

SEQ ID NO: 34367 - RNA, 14 nt, Artificial Sequence
  Description of Artificial Sequence: Synthetic oligonucleotide
cuaaaauacuaugu

SEQ ID NO: 34368 - RNA, 14 nt, Artificial Sequence
  Description of Artificial Sequence: Synthetic oligonucleotide
acuaaaauacuaug

SEQ ID NO: 34369 - RNA, 14 nt, Artificial Sequence
  Description of Artificial Sequence: Synthetic oligonucleotide
uacuaaaauacuau

SEQ ID NO: 34370 - RNA, 14 nt, Artificial Sequence
  Description of Artificial Sequence: Synthetic oligonucleotide
guacuaaaauacua

SEQ ID NO: 34371 - RNA, 14 nt, Artificial Sequence
  Description of Artificial Sequence: Synthetic oligonucleotide
aguacuaaaauacu

SEQ ID NO: 34372 - RNA, 14 nt, Artificial Sequence
  Description of Artificial Sequence: Synthetic oligonucleotide
aaguacuaaaauac

SEQ ID NO: 34373 - RNA, 14 nt, Artificial Sequence
  Description of Artificial Sequence: Synthetic oligonucleotide
aaaguacuaaaaua

SEQ ID NO: 34374 - RNA, 14 nt, Artificial Sequence
  Description of Artificial Sequence: Synthetic oligonucleotide
aaaaguacuaaaau

SEQ ID NO: 34375 - RNA, 14 nt, Artificial Sequence
  Description of Artificial Sequence: Synthetic oligonucleotide
aaaaaguacuaaaa

SEQ ID NO: 34376 - RNA, 14 nt, Artificial Sequence
  Description of Artificial Sequence: Synthetic oligonucleotide
uaaaaaguacuaaa

SEQ ID NO: 34377 - RNA, 14 nt, Artificial Sequence
  Description of Artificial Sequence: Synthetic oligonucleotide
guaaaaaguacuaa

SEQ ID NO: 34378 - RNA, 14 nt, Artificial Sequence
  Description of Artificial Sequence: Synthetic oligonucleotide
uguaaaaaguacua

SEQ ID NO: 34379 - RNA, 14 nt, Artificial Sequence
  Description of Artificial Sequence: Synthetic oligonucleotide
uuguaaaaaguacu

SEQ ID NO: 34380 - RNA, 14 nt, Artificial Sequence
  Description of Artificial Sequence: Synthetic oligonucleotide
uuuguaaaaaguac

SEQ ID NO: 34381 - RNA, 14 nt, Artificial Sequence
  Description of Artificial Sequence: Synthetic oligonucleotide
auuuguaaaaagua

SEQ ID NO: 34382 - RNA, 14 nt, Artificial Sequence
  Description of Artificial Sequence: Synthetic oligonucleotide
uauuuguaaaaagu

SEQ ID NO: 34383 - RNA, 14 nt, Artificial Sequence
  Description of Artificial Sequence: Synthetic oligonucleotide
uuauuuguaaaaag

SEQ ID NO: 34384 - RNA, 14 nt, Artificial Sequence
  Description of Artificial Sequence: Synthetic oligonucleotide
auuauuuguaaaaa

SEQ ID NO: 34385 - RNA, 14 nt, Artificial Sequence
  Description of Artificial Sequence: Synthetic oligonucleotide
cauuauuuguaaaa

SEQ ID NO: 34386 - RNA, 14 nt, Artificial Sequence
  Description of Artificial Sequence: Synthetic oligonucleotide
gcauuauuuguaaa

SEQ ID NO: 34387 - RNA, 14 nt, Artificial Sequence
  Description of Artificial Sequence: Synthetic oligonucleotide
agcauuauuuguaa

SEQ ID NO: 34388 - RNA, 14 nt, Artificial Sequence
  Description of Artificial Sequence: Synthetic oligonucleotide
gagcauuauuugua

SEQ ID NO: 34389 - RNA, 14 nt, Artificial Sequence
  Description of Artificial Sequence: Synthetic oligonucleotide
agagcauuauuugu

SEQ ID NO: 34390 - RNA, 14 nt, Artificial Sequence
  Description of Artificial Sequence: Synthetic oligonucleotide
aagagcauuauuug

SEQ ID NO: 34391 - RNA, 14 nt, Artificial Sequence
  Description of Artificial Sequence: Synthetic oligonucleotide
uaagagcauuauuu

SEQ ID NO: 34392 - RNA, 14 nt, Artificial Sequence
  Description of Artificial Sequence: Synthetic oligonucleotide
guaagagcauuauu

SEQ ID NO: 34393 - RNA, 14 nt, Artificial Sequence
  Description of Artificial Sequence: Synthetic oligonucleotide
uguaagagcauuau

SEQ ID NO: 34394 - RNA, 14 nt, Artificial Sequence
  Description of Artificial Sequence: Synthetic oligonucleotide
uuguaagagcauua

SEQ ID NO: 34395 - RNA, 14 nt, Artificial Sequence
  Description of Artificial Sequence: Synthetic oligonucleotide
uuuguaagagcauu

SEQ ID NO: 34396 - RNA, 14 nt, Artificial Sequence
  Description of Artificial Sequence: Synthetic oligonucleotide
uuuuguaagagcau

SEQ ID NO: 34397 - RNA, 14 nt, Artificial Sequence
  Description of Artificial Sequence: Synthetic oligonucleotide
uuuuuguaagagca

SEQ ID NO: 34398 - RNA, 14 nt, Artificial Sequence
  Description of Artificial Sequence: Synthetic oligonucleotide
auuuuuguaagagc

SEQ ID NO: 34399 - RNA, 14 nt, Artificial Sequence
  Description of Artificial Sequence: Synthetic oligonucleotide
cauuuuuguaagag

SEQ ID NO: 34400 - RNA, 14 nt, Artificial Sequence
  Description of Artificial Sequence: Synthetic oligonucleotide
gcauuuuuguaaga

SEQ ID NO: 34401 - RNA, 14 nt, Artificial Sequence
  Description of Artificial Sequence: Synthetic oligonucleotide
agcauuuuuguaag

SEQ ID NO: 34402 - RNA, 14 nt, Artificial Sequence
  Description of Artificial Sequence: Synthetic oligonucleotide
uagcauuuuuguaa

SEQ ID NO: 34403 - RNA, 14 nt, Artificial Sequence
  Description of Artificial Sequence: Synthetic oligonucleotide
guagcauuuuugua

SEQ ID NO: 34404 - RNA, 14 nt, Artificial Sequence
  Description of Artificial Sequence: Synthetic oligonucleotide
aguagcauuuuugu

SEQ ID NO: 34405 - RNA, 14 nt, Artificial Sequence
  Description of Artificial Sequence: Synthetic oligonucleotide
caguagcauuuuug

SEQ ID NO: 34406 - RNA, 14 nt, Artificial Sequence
  Description of Artificial Sequence: Synthetic oligonucleotide
ucaguagcauuuuu

SEQ ID NO: 34407 - RNA, 14 nt, Artificial Sequence
  Description of Artificial Sequence: Synthetic oligonucleotide
aucaguagcauuuu

SEQ ID NO: 34408 - RNA, 14 nt, Artificial Sequence
  Description of Artificial Sequence: Synthetic oligonucleotide
gaucaguagcauuu

SEQ ID NO: 34409 - RNA, 14 nt, Artificial Sequence
  Description of Artificial Sequence: Synthetic oligonucleotide
ugaucaguagcauu

SEQ ID NO: 34410 - RNA, 14 nt, Artificial Sequence
  Description of Artificial Sequence: Synthetic oligonucleotide
uugaucaguagcau

SEQ ID NO: 34411 - RNA, 14 nt, Artificial Sequence
  Description of Artificial Sequence: Synthetic oligonucleotide
uuugaucaguagca

SEQ ID NO: 34412 - RNA, 14 nt, Artificial Sequence
  Description of Artificial Sequence: Synthetic oligonucleotide
auuugaucaguagc

SEQ ID NO: 34413 - RNA, 14 nt, Artificial Sequence
  Description of Artificial Sequence: Synthetic oligonucleotide
uauuugaucaguag

SEQ ID NO: 34414 - RNA, 14 nt, Artificial Sequence
  Description of Artificial Sequence: Synthetic oligonucleotide
uuauuugaucagua

SEQ ID NO: 34415 - RNA, 14 nt, Artificial Sequence
  Description of Artificial Sequence: Synthetic oligonucleotide
cuuauuugaucagu

SEQ ID NO: 34416 - RNA, 14 nt, Artificial Sequence
  Description of Artificial Sequence: Synthetic oligonucleotide
gcuuauuugaucag

SEQ ID NO: 34417 - RNA, 14 nt, Artificial Sequence
  Description of Artificial Sequence: Synthetic oligonucleotide
agcuuauuugauca

SEQ ID NO: 34418 - RNA, 14 nt, Artificial Sequence
  Description of Artificial Sequence: Synthetic oligonucleotide
aagcuuauuugauc

SEQ ID NO: 34419 - RNA, 14 nt, Artificial Sequence
  Description of Artificial Sequence: Synthetic oligonucleotide
aaagcuuauuugau

SEQ ID NO: 34420 - RNA, 14 nt, Artificial Sequence
  Description of Artificial Sequence: Synthetic oligonucleotide
aaaagcuuauuuga

SEQ ID NO: 34421 - RNA, 14 nt, Artificial Sequence
  Description of Artificial Sequence: Synthetic oligonucleotide
uaaaagcuuauuug

SEQ ID NO: 34422 - RNA, 14 nt, Artificial Sequence
  Description of Artificial Sequence: Synthetic oligonucleotide
uuaaaagcuuauuu

SEQ ID NO: 34423 - RNA, 14 nt, Artificial Sequence
  Description of Artificial Sequence: Synthetic oligonucleotide
cuuaaaagcuuauu

SEQ ID NO: 34424 - RNA, 14 nt, Artificial Sequence
  Description of Artificial Sequence: Synthetic oligonucleotide
ucuuaaaagcuuau

SEQ ID NO: 34425 - RNA, 14 nt, Artificial Sequence
  Description of Artificial Sequence: Synthetic oligonucleotide
uucuuaaaagcuua

SEQ ID NO: 34426 - RNA, 14 nt, Artificial Sequence
  Description of Artificial Sequence: Synthetic oligonucleotide
auucuuaaaagcuu

SEQ ID NO: 34427 - RNA, 14 nt, Artificial Sequence
  Description of Artificial Sequence: Synthetic oligonucleotide
aauucuuaaaagcu

SEQ ID NO: 34428 - RNA, 14 nt, Artificial Sequence
  Description of Artificial Sequence: Synthetic oligonucleotide
caauucuuaaaagc

SEQ ID NO: 34429 - RNA, 14 nt, Artificial Sequence
  Description of Artificial Sequence: Synthetic oligonucleotide
ccaauucuuaaaag

SEQ ID NO: 34430 - RNA, 14 nt, Artificial Sequence
  Description of Artificial Sequence: Synthetic oligonucleotide
uccaauucuuaaaa

SEQ ID NO: 34431 - RNA, 14 nt, Artificial Sequence
  Description of Artificial Sequence: Synthetic oligonucleotide
uuccaauucuuaaa

SEQ ID NO: 34432 - RNA, 14 nt, Artificial Sequence
  Description of Artificial Sequence: Synthetic oligonucleotide
uuuccaauucuuaa

SEQ ID NO: 34433 - RNA, 14 nt, Artificial Sequence
  Description of Artificial Sequence: Synthetic oligonucleotide
uuuuccaauucuua

SEQ ID NO: 34434 - RNA, 14 nt, Artificial Sequence
  Description of Artificial Sequence: Synthetic oligonucleotide
uuuuuccaauucuu

SEQ ID NO: 34435 - RNA, 14 nt, Artificial Sequence
  Description of Artificial Sequence: Synthetic oligonucleotide
auuuuuccaauucu

SEQ ID NO: 34436 - RNA, 14 nt, Artificial Sequence
  Description of Artificial Sequence: Synthetic oligonucleotide
uauuuuuccaauuc

SEQ ID NO: 34437 - RNA, 14 nt, Artificial Sequence
  Description of Artificial Sequence: Synthetic oligonucleotide
uuauuuuuccaauu

SEQ ID NO: 34438 - RNA, 14 nt, Artificial Sequence
  Description of Artificial Sequence: Synthetic oligonucleotide
uuuauuuuuccaau

SEQ ID NO: 34439 - RNA, 14 nt, Artificial Sequence
  Description of Artificial Sequence: Synthetic oligonucleotide
uuuuauuuuuccaa

SEQ ID NO: 34440 - RNA, 14 nt, Artificial Sequence
  Description of Artificial Sequence: Synthetic oligonucleotide
uuuuuauuuuucca

SEQ ID NO: 34441 - RNA, 14 nt, Artificial Sequence
  Description of Artificial Sequence: Synthetic oligonucleotide
auuuuuauuuuucc

SEQ ID NO: 34442 - RNA, 14 nt, Artificial Sequence
  Description of Artificial Sequence: Synthetic oligonucleotide
uauuuuuauuuuuc

SEQ ID NO: 34443 - RNA, 14 nt, Artificial Sequence
  Description of Artificial Sequence: Synthetic oligonucleotide
guauuuuuauuuuu

SEQ ID NO: 34444 - RNA, 14 nt, Artificial Sequence
  Description of Artificial Sequence: Synthetic oligonucleotide
uguauuuuuauuuu

SEQ ID NO: 34445 - RNA, 14 nt, Artificial Sequence
  Description of Artificial Sequence: Synthetic oligonucleotide
uuguauuuuuauuu

SEQ ID NO: 34446 - RNA, 14 nt, Artificial Sequence
  Description of Artificial Sequence: Synthetic oligonucleotide
uuuguauuuuuauu

SEQ ID NO: 34447 - RNA, 14 nt, Artificial Sequence
  Description of Artificial Sequence: Synthetic oligonucleotide
uuuuguauuuuuau

SEQ ID NO: 34448 - RNA, 14 nt, Artificial Sequence
  Description of Artificial Sequence: Synthetic oligonucleotide
cuuuuguauuuuua

SEQ ID NO: 34449 - RNA, 14 nt, Artificial Sequence
  Description of Artificial Sequence: Synthetic oligonucleotide
acuuuuguauuuuu

SEQ ID NO: 34450 - RNA, 14 nt, Artificial Sequence
  Description of Artificial Sequence: Synthetic oligonucleotide
gacuuuuguauuuu

SEQ ID NO: 34451 - RNA, 14 nt, Artificial Sequence
  Description of Artificial Sequence: Synthetic oligonucleotide
ggacuuuuguauuu

SEQ ID NO: 34452 - RNA, 14 nt, Artificial Sequence
  Description of Artificial Sequence: Synthetic oligonucleotide
aggacuuuuguauu

SEQ ID NO: 34453 - RNA, 14 nt, Artificial Sequence
  Description of Artificial Sequence: Synthetic oligonucleotide
aaggacuuuuguau

SEQ ID NO: 34454 - RNA, 14 nt, Artificial Sequence
  Description of Artificial Sequence: Synthetic oligonucleotide
gaaggacuuuugua

SEQ ID NO: 34455 - RNA, 14 nt, Artificial Sequence
  Description of Artificial Sequence: Synthetic oligonucleotide
ugaaggacuuuugu

SEQ ID NO: 34456 - RNA, 14 nt, Artificial Sequence
  Description of Artificial Sequence: Synthetic oligonucleotide
gugaaggacuuuug

SEQ ID NO: 34457 - RNA, 14 nt, Artificial Sequence
  Description of Artificial Sequence: Synthetic oligonucleotide
ggugaaggacuuuu

SEQ ID NO: 34458 - RNA, 14 nt, Artificial Sequence
  Description of Artificial Sequence: Synthetic oligonucleotide
uggugaaggacuuu

SEQ ID NO: 34459 - RNA, 14 nt, Artificial Sequence
  Description of Artificial Sequence: Synthetic oligonucleotide
auggugaaggacuu

SEQ ID NO: 34460 - RNA, 14 nt, Artificial Sequence
  Description of Artificial Sequence: Synthetic oligonucleotide
aauggugaaggacu

SEQ ID NO: 34461 - RNA, 14 nt, Artificial Sequence
  Description of Artificial Sequence: Synthetic oligonucleotide
uaauggugaaggac

SEQ ID NO: 34462 - RNA, 14 nt, Artificial Sequence
  Description of Artificial Sequence: Synthetic oligonucleotide
auaauggugaagga

SEQ ID NO: 34463 - RNA, 14 nt, Artificial Sequence
  Description of Artificial Sequence: Synthetic oligonucleotide
gauaauggugaagg

SEQ ID NO: 34464 - RNA, 14 nt, Artificial Sequence
  Description of Artificial Sequence: Synthetic oligonucleotide
ggauaauggugaag

SEQ ID NO: 34465 - RNA, 14 nt, Artificial Sequence
  Description of Artificial Sequence: Synthetic oligonucleotide
aggauaauggugaa

SEQ ID NO: 34466 - RNA, 14 nt, Artificial Sequence
  Description of Artificial Sequence: Synthetic oligonucleotide
gaggauaaugguga

SEQ ID NO: 34467 - RNA, 14 nt, Artificial Sequence
  Description of Artificial Sequence: Synthetic oligonucleotide
ugaggauaauggug

SEQ ID NO: 34468 - RNA, 14 nt, Artificial Sequence
  Description of Artificial Sequence: Synthetic oligonucleotide
cugaggauaauggu

SEQ ID NO: 34469 - RNA, 14 nt, Artificial Sequence
  Description of Artificial Sequence: Synthetic oligonucleotide
ccugaggauaaugg

SEQ ID NO: 34470 - RNA, 14 nt, Artificial Sequence
  Description of Artificial Sequence: Synthetic oligonucleotide
accugaggauaaug

SEQ ID NO: 34471 - RNA, 14 nt, Artificial Sequence
  Description of Artificial Sequence: Synthetic oligonucleotide
caccugaggauaau

SEQ ID NO: 34472 - RNA, 14 nt, Artificial Sequence
  Description of Artificial Sequence: Synthetic oligonucleotide
ucaccugaggauaa

SEQ ID NO: 34473 - RNA, 14 nt, Artificial Sequence
  Description of Artificial Sequence: Synthetic oligonucleotide
aucaccugaggaua

SEQ ID NO: 34474 - RNA, 14 nt, Artificial Sequence
  Description of Artificial Sequence: Synthetic oligonucleotide
gaucaccugaggau

SEQ ID NO: 34475 - RNA, 14 nt, Artificial Sequence
  Description of Artificial Sequence: Synthetic oligonucleotide
ugaucaccugagga

SEQ ID NO: 34476 - RNA, 14 nt, Artificial Sequence
  Description of Artificial Sequence: Synthetic oligonucleotide
cugaucaccugagg

SEQ ID NO: 34477 - RNA, 14 nt, Artificial Sequence
  Description of Artificial Sequence: Synthetic oligonucleotide
acugaucaccugag

SEQ ID NO: 34478 - RNA, 14 nt, Artificial Sequence
  Description of Artificial Sequence: Synthetic oligonucleotide
uacugaucaccuga

SEQ ID NO: 34479 - RNA, 14 nt, Artificial Sequence
  Description of Artificial Sequence: Synthetic oligonucleotide
cuacugaucaccug

SEQ ID NO: 34480 - RNA, 14 nt, Artificial Sequence
  Description of Artificial Sequence: Synthetic oligonucleotide
gcuacugaucaccu

SEQ ID NO: 34481 - RNA, 14 nt, Artificial Sequence
  Description of Artificial Sequence: Synthetic oligonucleotide
ugcuacugaucacc

SEQ ID NO: 34482 - RNA, 14 nt, Artificial Sequence
  Description of Artificial Sequence: Synthetic oligonucleotide
augcuacugaucac

SEQ ID NO: 34483 - RNA, 14 nt, Artificial Sequence
  Description of Artificial Sequence: Synthetic oligonucleotide
aaugcuacugauca

SEQ ID NO: 34484 - RNA, 14 nt, Artificial Sequence
  Description of Artificial Sequence: Synthetic oligonucleotide
caaugcuacugauc

SEQ ID NO: 34485 - RNA, 14 nt, Artificial Sequence
  Description of Artificial Sequence: Synthetic oligonucleotide
gcaaugcuacugau

SEQ ID NO: 34486 - RNA, 14 nt, Artificial Sequence
  Description of Artificial Sequence: Synthetic oligonucleotide
ggcaaugcuacuga

SEQ ID NO: 34487 - RNA, 14 nt, Artificial Sequence
  Description of Artificial Sequence: Synthetic oligonucleotide
aggcaaugcuacug

SEQ ID NO: 34488 - RNA, 14 nt, Artificial Sequence
  Description of Artificial Sequence: Synthetic oligonucleotide
aaggcaaugcuacu

SEQ ID NO: 34489 - RNA, 14 nt, Artificial Sequence
  Description of Artificial Sequence: Synthetic oligonucleotide
caaggcaaugcuac

SEQ ID NO: 34490 - RNA, 14 nt, Artificial Sequence
  Description of Artificial Sequence: Synthetic oligonucleotide
acaaggcaaugcua

SEQ ID NO: 34491 - RNA, 14 nt, Artificial Sequence
  Description of Artificial Sequence: Synthetic oligonucleotide
gacaaggcaaugcu

SEQ ID NO: 34492 - RNA, 14 nt, Artificial Sequence
  Description of Artificial Sequence: Synthetic oligonucleotide
agacaaggcaaugc

SEQ ID NO: 34493 - RNA, 14 nt, Artificial Sequence
  Description of Artificial Sequence: Synthetic oligonucleotide
aagacaaggcaaug

SEQ ID NO: 34494 - RNA, 14 nt, Artificial Sequence
  Description of Artificial Sequence: Synthetic oligonucleotide
caagacaaggcaau

SEQ ID NO: 34495 - DNA, 14 bp, Artificial Sequence
  Description of Artificial Sequence: Synthetic oligonucleotide
ccaagacaaggcaa

SEQ ID NO: 34496 - RNA, 14 nt, Artificial Sequence
  Description of Artificial Sequence: Synthetic oligonucleotide
uccaagacaaggca

SEQ ID NO: 34497 - RNA, 14 nt, Artificial Sequence
  Description of Artificial Sequence: Synthetic oligonucleotide
auccaagacaaggc

SEQ ID NO: 34498 - RNA, 14 nt, Artificial Sequence
  Description of Artificial Sequence: Synthetic oligonucleotide
gauccaagacaagg

SEQ ID NO: 34499 - RNA, 14 nt, Artificial Sequence
  Description of Artificial Sequence: Synthetic oligonucleotide
ggauccaagacaag

SEQ ID NO: 34500 - RNA, 14 nt, Artificial Sequence
  Description of Artificial Sequence: Synthetic oligonucleotide
aggauccaagacaa

SEQ ID NO: 34501 - RNA, 14 nt, Artificial Sequence
  Description of Artificial Sequence: Synthetic oligonucleotide
gaggauccaagaca

SEQ ID NO: 34502 - RNA, 14 nt, Artificial Sequence
  Description of Artificial Sequence: Synthetic oligonucleotide
ugaggauccaagac

SEQ ID NO: 34503 - RNA, 14 nt, Artificial Sequence
  Description of Artificial Sequence: Synthetic oligonucleotide
cugaggauccaaga

SEQ ID NO: 34504 - RNA, 14 nt, Artificial Sequence
  Description of Artificial Sequence: Synthetic oligonucleotide
acugaggauccaag

SEQ ID NO: 34505 - RNA, 14 nt, Artificial Sequence
  Description of Artificial Sequence: Synthetic oligonucleotide
cacugaggauccaa

SEQ ID NO: 34506 - RNA, 14 nt, Artificial Sequence
  Description of Artificial Sequence: Synthetic oligonucleotide
gcacugaggaucca

SEQ ID NO: 34507 - RNA, 14 nt, Artificial Sequence
  Description of Artificial Sequence: Synthetic oligonucleotide
agcacugaggaucc

SEQ ID NO: 34508 - RNA, 14 nt, Artificial Sequence
  Description of Artificial Sequence: Synthetic oligonucleotide
cagcacugaggauc

SEQ ID NO: 34509 - RNA, 14 nt, Artificial Sequence
  Description of Artificial Sequence: Synthetic oligonucleotide
gcagcacugaggau

SEQ ID NO: 34510 - RNA, 14 nt, Artificial Sequence
  Description of Artificial Sequence: Synthetic oligonucleotide
ggcagcacugagga

SEQ ID NO: 34511 - RNA, 14 nt, Artificial Sequence
  Description of Artificial Sequence: Synthetic oligonucleotide
uggcagcacugagg

SEQ ID NO: 34512 - RNA, 14 nt, Artificial Sequence
  Description of Artificial Sequence: Synthetic oligonucleotide
uuggcagcacugag

SEQ ID NO: 34513 - RNA, 14 nt, Artificial Sequence
  Description of Artificial Sequence: Synthetic oligonucleotide
uuuggcagcacuga

SEQ ID NO: 34514 - RNA, 14 nt, Artificial Sequence
  Description of Artificial Sequence: Synthetic oligonucleotide
uuuuggcagcacug

SEQ ID NO: 34515 - RNA, 14 nt, Artificial Sequence
  Description of Artificial Sequence: Synthetic oligonucleotide
cuuuuggcagcacu

SEQ ID NO: 34516 - RNA, 14 nt, Artificial Sequence
  Description of Artificial Sequence: Synthetic oligonucleotide
ccuuuuggcagcac

SEQ ID NO: 34517 - RNA, 14 nt, Artificial Sequence
  Description of Artificial Sequence: Synthetic oligonucleotide
gccuuuuggcagca

SEQ ID NO: 34518 - RNA, 14 nt, Artificial Sequence
  Description of Artificial Sequence: Synthetic oligonucleotide
ggccuuuuggcagc

SEQ ID NO: 34519 - RNA, 14 nt, Artificial Sequence
  Description of Artificial Sequence: Synthetic oligonucleotide
uggccuuuuggcag

SEQ ID NO: 34520 - RNA, 14 nt, Artificial Sequence
  Description of Artificial Sequence: Synthetic oligonucleotide
cuggccuuuuggca

SEQ ID NO: 34521 - RNA, 14 nt, Artificial Sequence
  Description of Artificial Sequence: Synthetic oligonucleotide
acuggccuuuuggc

SEQ ID NO: 34522 - RNA, 14 nt, Artificial Sequence
  Description of Artificial Sequence: Synthetic oligonucleotide
uacuggccuuuugg

SEQ ID NO: 34523 - RNA, 14 nt, Artificial Sequence
  Description of Artificial Sequence: Synthetic oligonucleotide
auacuggccuuuug

SEQ ID NO: 34524 - RNA, 14 nt, Artificial Sequence
  Description of Artificial Sequence: Synthetic oligonucleotide
uauacuggccuuuu

SEQ ID NO: 34525 - RNA, 14 nt, Artificial Sequence
  Description of Artificial Sequence: Synthetic oligonucleotide
uuauacuggccuuu

SEQ ID NO: 34526 - RNA, 14 nt, Artificial Sequence
  Description of Artificial Sequence: Synthetic oligonucleotide
uuuauacuggccuu

SEQ ID NO: 34527 - RNA, 14 nt, Artificial Sequence
  Description of Artificial Sequence: Synthetic oligonucleotide
cuuuauacuggccu

SEQ ID NO: 34528 - RNA, 14 nt, Artificial Sequence
  Description of Artificial Sequence: Synthetic oligonucleotide
ucuuuauacuggcc

SEQ ID NO: 34529 - RNA, 14 nt, Artificial Sequence
  Description of Artificial Sequence: Synthetic oligonucleotide
uucuuuauacuggc

SEQ ID NO: 34530 - RNA, 14 nt, Artificial Sequence
  Description of Artificial Sequence: Synthetic oligonucleotide
auucuuuauacugg

SEQ ID NO: 34531 - RNA, 14 nt, Artificial Sequence
  Description of Artificial Sequence: Synthetic oligonucleotide
aauucuuuauacug

SEQ ID NO: 34532 - RNA, 14 nt, Artificial Sequence
  Description of Artificial Sequence: Synthetic oligonucleotide
aaauucuuuauacu

SEQ ID NO: 34533 - RNA, 14 nt, Artificial Sequence
  Description of Artificial Sequence: Synthetic oligonucleotide
uaaauucuuuauac

SEQ ID NO: 34534 - RNA, 14 nt, Artificial Sequence
  Description of Artificial Sequence: Synthetic oligonucleotide
auaaauucuuuaua

SEQ ID NO: 34535 - RNA, 14 nt, Artificial Sequence
  Description of Artificial Sequence: Synthetic oligonucleotide
uauaaauucuuuau

SEQ ID NO: 34536 - RNA, 14 nt, Artificial Sequence
  Description of Artificial Sequence: Synthetic oligonucleotide
auauaaauucuuua

SEQ ID NO: 34537 - RNA, 14 nt, Artificial Sequence
  Description of Artificial Sequence: Synthetic oligonucleotide
aauauaaauucuuu

SEQ ID NO: 34538 - RNA, 14 nt, Artificial Sequence
  Description of Artificial Sequence: Synthetic oligonucleotide
aaauauaaauucuu

SEQ ID NO: 34539 - RNA, 14 nt, Artificial Sequence
  Description of Artificial Sequence: Synthetic oligonucleotide
caaauauaaauucu

SEQ ID NO: 34540 - RNA, 14 nt, Artificial Sequence
  Description of Artificial Sequence: Synthetic oligonucleotide
gcaaauauaaauuc

SEQ ID NO: 34541 - RNA, 14 nt, Artificial Sequence
  Description of Artificial Sequence: Synthetic oligonucleotide
ugcaaauauaaauu

SEQ ID NO: 34542 - RNA, 14 nt, Artificial Sequence
  Description of Artificial Sequence: Synthetic oligonucleotide
gugcaaauauaaau

SEQ ID NO: 34543 - RNA, 14 nt, Artificial Sequence
  Description of Artificial Sequence: Synthetic oligonucleotide
agugcaaauauaaa

SEQ ID NO: 34544 - RNA, 14 nt, Artificial Sequence
  Description of Artificial Sequence: Synthetic oligonucleotide
cagugcaaauauaa

SEQ ID NO: 34545 - RNA, 14 nt, Artificial Sequence
  Description of Artificial Sequence: Synthetic oligonucleotide
acagugcaaauaua

SEQ ID NO: 34546 - RNA, 14 nt, Artificial Sequence
  Description of Artificial Sequence: Synthetic oligonucleotide
uacagugcaaauau

SEQ ID NO: 34547 - RNA, 14 nt, Artificial Sequence
  Description of Artificial Sequence: Synthetic oligonucleotide
uuacagugcaaaua

SEQ ID NO: 34548 - RNA, 14 nt, Artificial Sequence
  Description of Artificial Sequence: Synthetic oligonucleotide
uuuacagugcaaau

SEQ ID NO: 34549 - RNA, 14 nt, Artificial Sequence
  Description of Artificial Sequence: Synthetic oligonucleotide
guuuacagugcaaa

SEQ ID NO: 34550 - RNA, 14 nt, Artificial Sequence
  Description of Artificial Sequence: Synthetic oligonucleotide
aguuuacagugcaa

SEQ ID NO: 34551 - RNA, 14 nt, Artificial Sequence
  Description of Artificial Sequence: Synthetic oligonucleotide
gaguuuacagugca

SEQ ID NO: 34552 - RNA, 14 nt, Artificial Sequence
  Description of Artificial Sequence: Synthetic oligonucleotide
agaguuuacagugc

SEQ ID NO: 34553 - RNA, 14 nt, Artificial Sequence
  Description of Artificial Sequence: Synthetic oligonucleotide
cagaguuuacagug

SEQ ID NO: 34554 - RNA, 14 nt, Artificial Sequence
  Description of Artificial Sequence: Synthetic oligonucleotide
gcagaguuuacagu

SEQ ID NO: 34555 - RNA, 14 nt, Artificial Sequence
  Description of Artificial Sequence: Synthetic oligonucleotide
ugcagaguuuacag

SEQ ID NO: 34556 - RNA, 14 nt, Artificial Sequence
  Description of Artificial Sequence: Synthetic oligonucleotide
uugcagaguuuaca

SEQ ID NO: 34557 - RNA, 14 nt, Artificial Sequence
  Description of Artificial Sequence: Synthetic oligonucleotide
uuugcagaguuuac

SEQ ID NO: 34558 - RNA, 14 nt, Artificial Sequence
  Description of Artificial Sequence: Synthetic oligonucleotide
uuuugcagaguuua

SEQ ID NO: 34559 - RNA, 14 nt, Artificial Sequence
  Description of Artificial Sequence: Synthetic oligonucleotide
uuuuugcagaguuu

SEQ ID NO: 34560 - RNA, 14 nt, Artificial Sequence
  Description of Artificial Sequence: Synthetic oligonucleotide
auuuuugcagaguu

SEQ ID NO: 34561 - RNA, 14 nt, Artificial Sequence
  Description of Artificial Sequence: Synthetic oligonucleotide
uauuuuugcagagu

SEQ ID NO: 34562 - RNA, 14 nt, Artificial Sequence
  Description of Artificial Sequence: Synthetic oligonucleotide
auauuuuugcagag

SEQ ID NO: 34563 - RNA, 14 nt, Artificial Sequence
  Description of Artificial Sequence: Synthetic oligonucleotide
cauauuuuugcaga

SEQ ID NO: 34564 - RNA, 14 nt, Artificial Sequence
  Description of Artificial Sequence: Synthetic oligonucleotide
ccauauuuuugcag

SEQ ID NO: 34565 - RNA, 14 nt, Artificial Sequence
  Description of Artificial Sequence: Synthetic oligonucleotide
accauauuuuugca

SEQ ID NO: 34566 - RNA, 14 nt, Artificial Sequence
  Description of Artificial Sequence: Synthetic oligonucleotide
aaccauauuuuugc

SEQ ID NO: 34567 - RNA, 14 nt, Artificial Sequence
  Description of Artificial Sequence: Synthetic oligonucleotide
aaaccauauuuuug

SEQ ID NO: 34568 - RNA, 14 nt, Artificial Sequence
  Description of Artificial Sequence: Synthetic oligonucleotide
uaaaccauauuuuu

SEQ ID NO: 34569 - RNA, 14 nt, Artificial Sequence
  Description of Artificial Sequence: Synthetic oligonucleotide
uuaaaccauauuuu

SEQ ID NO: 34570 - RNA, 14 nt, Artificial Sequence
  Description of Artificial Sequence: Synthetic oligonucleotide
uuuaaaccauauuu

SEQ ID NO: 34571 - RNA, 14 nt, Artificial Sequence
  Description of Artificial Sequence: Synthetic oligonucleotide
cuuuaaaccauauu

SEQ ID NO: 34572 - RNA, 14 nt, Artificial Sequence
  Description of Artificial Sequence: Synthetic oligonucleotide
acuuuaaaccauau

SEQ ID NO: 34573 - RNA, 14 nt, Artificial Sequence
  Description of Artificial Sequence: Synthetic oligonucleotide
cacuuuaaaccaua

SEQ ID NO: 34574 - RNA, 14 nt, Artificial Sequence
  Description of Artificial Sequence: Synthetic oligonucleotide
ucacuuuaaaccau

SEQ ID NO: 34575 - RNA, 14 nt, Artificial Sequence
  Description of Artificial Sequence: Synthetic oligonucleotide
gucacuuuaaacca

SEQ ID NO: 34576 - RNA, 14 nt, Artificial Sequence
  Description of Artificial Sequence: Synthetic oligonucleotide
ugucacuuuaaacc

SEQ ID NO: 34577 - RNA, 14 nt, Artificial Sequence
  Description of Artificial Sequence: Synthetic oligonucleotide
augucacuuuaaac

SEQ ID NO: 34578 - RNA, 14 nt, Artificial Sequence
  Description of Artificial Sequence: Synthetic oligonucleotide
caugucacuuuaaa

SEQ ID NO: 34579 - RNA, 14 nt, Artificial Sequence
  Description of Artificial Sequence: Synthetic oligonucleotide
ucaugucacuuuaa

SEQ ID NO: 34580 - RNA, 14 nt, Artificial Sequence
  Description of Artificial Sequence: Synthetic oligonucleotide
aucaugucacuuua

SEQ ID NO: 34581 - RNA, 14 nt, Artificial Sequence
  Description of Artificial Sequence: Synthetic oligonucleotide
aaucaugucacuuu

SEQ ID NO: 34582 - RNA, 14 nt, Artificial Sequence
  Description of Artificial Sequence: Synthetic oligonucleotide
caaucaugucacuu

SEQ ID NO: 34583 - RNA, 14 nt, Artificial Sequence
  Description of Artificial Sequence: Synthetic oligonucleotide
gcaaucaugucacu

SEQ ID NO: 34584 - RNA, 14 nt, Artificial Sequence
  Description of Artificial Sequence: Synthetic oligonucleotide
ugcaaucaugucac

SEQ ID NO: 34585 - RNA, 14 nt, Artificial Sequence
  Description of Artificial Sequence: Synthetic oligonucleotide
gugcaaucauguca

SEQ ID NO: 34586 - RNA, 14 nt, Artificial Sequence
  Description of Artificial Sequence: Synthetic oligonucleotide
agugcaaucauguc

SEQ ID NO: 34587 - RNA, 14 nt, Artificial Sequence
  Description of Artificial Sequence: Synthetic oligonucleotide
cagugcaaucaugu

SEQ ID NO: 34588 - RNA, 14 nt, Artificial Sequence
  Description of Artificial Sequence: Synthetic oligonucleotide
ucagugcaaucaug

SEQ ID NO: 34589 - RNA, 14 nt, Artificial Sequence
  Description of Artificial Sequence: Synthetic oligonucleotide
uucagugcaaucau

SEQ ID NO: 34590 - RNA, 14 nt, Artificial Sequence
  Description of Artificial Sequence: Synthetic oligonucleotide
uuucagugcaauca

SEQ ID NO: 34591 - RNA, 14 nt, Artificial Sequence
  Description of Artificial Sequence: Synthetic oligonucleotide
uuuucagugcaauc

SEQ ID NO: 34592 - RNA, 14 nt, Artificial Sequence
  Description of Artificial Sequence: Synthetic oligonucleotide
cuuuucagugcaau

SEQ ID NO: 34593 - RNA, 14 nt, Artificial Sequence
  Description of Artificial Sequence: Synthetic oligonucleotide
ccuuuucagugcaa

SEQ ID NO: 34594 - RNA, 14 nt, Artificial Sequence
  Description of Artificial Sequence: Synthetic oligonucleotide
cccuuuucagugca

SEQ ID NO: 34595 - RNA, 14 nt, Artificial Sequence
  Description of Artificial Sequence: Synthetic oligonucleotide
ucccuuuucagugc

SEQ ID NO: 34596 - RNA, 14 nt, Artificial Sequence
  Description of Artificial Sequence: Synthetic oligonucleotide
aucccuuuucagug

SEQ ID NO: 34597 - RNA, 14 nt, Artificial Sequence
  Description of Artificial Sequence: Synthetic oligonucleotide
uaucccuuuucagu

SEQ ID NO: 34598 - RNA, 14 nt, Artificial Sequence
  Description of Artificial Sequence: Synthetic oligonucleotide
cuaucccuuuucag

SEQ ID NO: 34599 - RNA, 14 nt, Artificial Sequence
  Description of Artificial Sequence: Synthetic oligonucleotide
acuaucccuuuuca

SEQ ID NO: 34600 - RNA, 14 nt, Artificial Sequence
  Description of Artificial Sequence: Synthetic oligonucleotide
cacuaucccuuuuc

SEQ ID NO: 34601 - RNA, 14 nt, Artificial Sequence
  Description of Artificial Sequence: Synthetic oligonucleotide
gcacuaucccuuuu

SEQ ID NO: 34602 - RNA, 14 nt, Artificial Sequence
  Description of Artificial Sequence: Synthetic oligonucleotide
agcacuaucccuuu

SEQ ID NO: 34603 - RNA, 14 nt, Artificial Sequence
  Description of Artificial Sequence: Synthetic oligonucleotide
aagcacuaucccuu

SEQ ID NO: 34604 - RNA, 14 nt, Artificial Sequence
  Description of Artificial Sequence: Synthetic oligonucleotide
aaagcacuaucccu

SEQ ID NO: 34605 - RNA, 14 nt, Artificial Sequence
  Description of Artificial Sequence: Synthetic oligonucleotide
aaaagcacuauccc

SEQ ID NO: 34606 - RNA, 14 nt, Artificial Sequence
  Description of Artificial Sequence: Synthetic oligonucleotide
caaaagcacuaucc

SEQ ID NO: 34607 - RNA, 14 nt, Artificial Sequence
  Description of Artificial Sequence: Synthetic oligonucleotide
acaaaagcacuauc

SEQ ID NO: 34608 - RNA, 14 nt, Artificial Sequence
  Description of Artificial Sequence: Synthetic oligonucleotide
cacaaaagcacuau

SEQ ID NO: 34609 - RNA, 14 nt, Artificial Sequence
  Description of Artificial Sequence: Synthetic oligonucleotide
ucacaaaagcacua

SEQ ID NO: 34610 - RNA, 14 nt, Artificial Sequence
  Description of Artificial Sequence: Synthetic oligonucleotide
uucacaaaagcacu

SEQ ID NO: 34611 - RNA, 14 nt, Artificial Sequence
  Description of Artificial Sequence: Synthetic oligonucleotide
uuucacaaaagcac

SEQ ID NO: 34612 - RNA, 14 nt, Artificial Sequence
  Description of Artificial Sequence: Synthetic oligonucleotide
auuucacaaaagca

SEQ ID NO: 34613 - RNA, 14 nt, Artificial Sequence
  Description of Artificial Sequence: Synthetic oligonucleotide
aauuucacaaaagc

SEQ ID NO: 34614 - RNA, 14 nt, Artificial Sequence
  Description of Artificial Sequence: Synthetic oligonucleotide
aaauuucacaaaag

SEQ ID NO: 34615 - RNA, 14 nt, Artificial Sequence
  Description of Artificial Sequence: Synthetic oligonucleotide
aaaauuucacaaaa

SEQ ID NO: 34616 - RNA, 14 nt, Artificial Sequence
  Description of Artificial Sequence: Synthetic oligonucleotide
aaaaauuucacaaa

SEQ ID NO: 34617 - RNA, 14 nt, Artificial Sequence
  Description of Artificial Sequence: Synthetic oligonucleotide
gaaaaauuucacaa

SEQ ID NO: 34618 - RNA, 14 nt, Artificial Sequence
  Description of Artificial Sequence: Synthetic oligonucleotide
ugaaaaauuucaca

SEQ ID NO: 34619 - RNA, 14 nt, Artificial Sequence
  Description of Artificial Sequence: Synthetic oligonucleotide
uugaaaaauuucac

SEQ ID NO: 34620 - RNA, 14 nt, Artificial Sequence
  Description of Artificial Sequence: Synthetic oligonucleotide
uuugaaaaauuuca

SEQ ID NO: 34621 - RNA, 14 nt, Artificial Sequence
  Description of Artificial Sequence: Synthetic oligonucleotide
auuugaaaaauuuc

SEQ ID NO: 34622 - RNA, 14 nt, Artificial Sequence
  Description of Artificial Sequence: Synthetic oligonucleotide
aauuugaaaaauuu

SEQ ID NO: 34623 - RNA, 14 nt, Artificial Sequence
  Description of Artificial Sequence: Synthetic oligonucleotide
aaauuugaaaaauu

SEQ ID NO: 34624 - RNA, 14 nt, Artificial Sequence
  Description of Artificial Sequence: Synthetic oligonucleotide
caaauuugaaaaau

SEQ ID NO: 34625 - RNA, 14 nt, Artificial Sequence
  Description of Artificial Sequence: Synthetic oligonucleotide
ucaaauuugaaaaa

SEQ ID NO: 34626 - RNA, 14 nt, Artificial Sequence
  Description of Artificial Sequence: Synthetic oligonucleotide
cucaaauuugaaaa

SEQ ID NO: 34627 - RNA, 14 nt, Artificial Sequence
  Description of Artificial Sequence: Synthetic oligonucleotide
acucaaauuugaaa

SEQ ID NO: 34628 - RNA, 14 nt, Artificial Sequence
  Description of Artificial Sequence: Synthetic oligonucleotide
uacucaaauuugaa

SEQ ID NO: 34629 - RNA, 14 nt, Artificial Sequence
  Description of Artificial Sequence: Synthetic oligonucleotide
uuacucaaauuuga

SEQ ID NO: 34630 - RNA, 14 nt, Artificial Sequence
  Description of Artificial Sequence: Synthetic oligonucleotide
auuacucaaauuug

SEQ ID NO: 34631 - RNA, 14 nt, Artificial Sequence
  Description of Artificial Sequence: Synthetic oligonucleotide
uauuacucaaauuu

SEQ ID NO: 34632 - RNA, 14 nt, Artificial Sequence
  Description of Artificial Sequence: Synthetic oligonucleotide
cuauuacucaaauu

SEQ ID NO: 34633 - RNA, 14 nt, Artificial Sequence
  Description of Artificial Sequence: Synthetic oligonucleotide
ucuauuacucaaau

SEQ ID NO: 34634 - RNA, 14 nt, Artificial Sequence
  Description of Artificial Sequence: Synthetic oligonucleotide
aucuauuacucaaa

SEQ ID NO: 34635 - RNA, 14 nt, Artificial Sequence
  Description of Artificial Sequence: Synthetic oligonucleotide
caucuauuacucaa

SEQ ID NO: 34636 - RNA, 14 nt, Artificial Sequence
  Description of Artificial Sequence: Synthetic oligonucleotide
gcaucuauuacuca

SEQ ID NO: 34637 - RNA, 14 nt, Artificial Sequence
  Description of Artificial Sequence: Synthetic oligonucleotide
ggcaucuauuacuc

SEQ ID NO: 34638 - RNA, 14 nt, Artificial Sequence
  Description of Artificial Sequence: Synthetic oligonucleotide
aggcaucuauuacu

SEQ ID NO: 34639 - RNA, 14 nt, Artificial Sequence
  Description of Artificial Sequence: Synthetic oligonucleotide
aaggcaucuauuac

SEQ ID NO: 34640 - RNA, 14 nt, Artificial Sequence
  Description of Artificial Sequence: Synthetic oligonucleotide
aaaggcaucuauua

SEQ ID NO: 34641 - RNA, 14 nt, Artificial Sequence
  Description of Artificial Sequence: Synthetic oligonucleotide
aaaaggcaucuauu

SEQ ID NO: 34642 - RNA, 14 nt, Artificial Sequence
  Description of Artificial Sequence: Synthetic oligonucleotide
aaaaaggcaucuau

SEQ ID NO: 34643 - RNA, 14 nt, Artificial Sequence
  Description of Artificial Sequence: Synthetic oligonucleotide
uaaaaaggcaucua

SEQ ID NO: 34644 - RNA, 14 nt, Artificial Sequence
  Description of Artificial Sequence: Synthetic oligonucleotide
uuaaaaaggcaucu

SEQ ID NO: 34645 - RNA, 14 nt, Artificial Sequence
  Description of Artificial Sequence: Synthetic oligonucleotide
cuuaaaaaggcauc

SEQ ID NO: 34646 - RNA, 14 nt, Artificial Sequence
  Description of Artificial Sequence: Synthetic oligonucleotide
ccuuaaaaaggcau

SEQ ID NO: 34647 - RNA, 14 nt, Artificial Sequence
  Description of Artificial Sequence: Synthetic oligonucleotide
gccuuaaaaaggca

SEQ ID NO: 34648 - RNA, 14 nt, Artificial Sequence
  Description of Artificial Sequence: Synthetic oligonucleotide
ugccuuaaaaaggc

SEQ ID NO: 34649 - RNA, 14 nt, Artificial Sequence
  Description of Artificial Sequence: Synthetic oligonucleotide
cugccuuaaaaagg

SEQ ID NO: 34650 - RNA, 14 nt, Artificial Sequence
  Description of Artificial Sequence: Synthetic oligonucleotide
acugccuuaaaaag

SEQ ID NO: 34651 - RNA, 14 nt, Artificial Sequence
  Description of Artificial Sequence: Synthetic oligonucleotide
cacugccuuaaaaa

SEQ ID NO: 34652 - RNA, 14 nt, Artificial Sequence
  Description of Artificial Sequence: Synthetic oligonucleotide
ucacugccuuaaaa

SEQ ID NO: 34653 - RNA, 14 nt, Artificial Sequence
  Description of Artificial Sequence: Synthetic oligonucleotide
uucacugccuuaaa

SEQ ID NO: 34654 - RNA, 14 nt, Artificial Sequence
  Description of Artificial Sequence: Synthetic oligonucleotide
auucacugccuuaa

SEQ ID NO: 34655 - RNA, 14 nt, Artificial Sequence
  Description of Artificial Sequence: Synthetic oligonucleotide
aauucacugccuua

SEQ ID NO: 34656 - RNA, 14 nt, Artificial Sequence
  Description of Artificial Sequence: Synthetic oligonucleotide
aaauucacugccuu

SEQ ID NO: 34657 - RNA, 14 nt, Artificial Sequence
  Description of Artificial Sequence: Synthetic oligonucleotide
uaaauucacugccu

SEQ ID NO: 34658 - RNA, 14 nt, Artificial Sequence
  Description of Artificial Sequence: Synthetic oligonucleotide
guaaauucacugcc

SEQ ID NO: 34659 - RNA, 14 nt, Artificial Sequence
  Description of Artificial Sequence: Synthetic oligonucleotide
uguaaauucacugc

SEQ ID NO: 34660 - RNA, 14 nt, Artificial Sequence
  Description of Artificial Sequence: Synthetic oligonucleotide
guguaaauucacug

SEQ ID NO: 34661 - RNA, 14 nt, Artificial Sequence
  Description of Artificial Sequence: Synthetic oligonucleotide
uguguaaauucacu

SEQ ID NO: 34662 - RNA, 14 nt, Artificial Sequence
  Description of Artificial Sequence: Synthetic oligonucleotide
uuguguaaauucac

SEQ ID NO: 34663 - RNA, 14 nt, Artificial Sequence
  Description of Artificial Sequence: Synthetic oligonucleotide
uuuguguaaauuca

SEQ ID NO: 34664 - RNA, 14 nt, Artificial Sequence
  Description of Artificial Sequence: Synthetic oligonucleotide
auuuguguaaauuc

SEQ ID NO: 34665 - RNA, 14 nt, Artificial Sequence
  Description of Artificial Sequence: Synthetic oligonucleotide
uauuuguguaaauu

SEQ ID NO: 34666 - RNA, 14 nt, Artificial Sequence
  Description of Artificial Sequence: Synthetic oligonucleotide
auauuuguguaaau

SEQ ID NO: 34667 - RNA, 14 nt, Artificial Sequence
  Description of Artificial Sequence: Synthetic oligonucleotide
cauauuuguguaaa

SEQ ID NO: 34668 - RNA, 14 nt, Artificial Sequence
  Description of Artificial Sequence: Synthetic oligonucleotide
ccauauuuguguaa

SEQ ID NO: 34669 - RNA, 14 nt, Artificial Sequence
  Description of Artificial Sequence: Synthetic oligonucleotide
cccauauuugugua

SEQ ID NO: 34670 - RNA, 14 nt, Artificial Sequence
  Description of Artificial Sequence: Synthetic oligonucleotide
ucccauauuugugu

SEQ ID NO: 34671 - RNA, 14 nt, Artificial Sequence
  Description of Artificial Sequence: Synthetic oligonucleotide
cucccauauuugug

SEQ ID NO: 34672 - RNA, 14 nt, Artificial Sequence
  Description of Artificial Sequence: Synthetic oligonucleotide
ccucccauauuugu

SEQ ID NO: 34673 - RNA, 14 nt, Artificial Sequence
  Description of Artificial Sequence: Synthetic oligonucleotide
cccucccauauuug

SEQ ID NO: 34674 - RNA, 14 nt, Artificial Sequence
  Description of Artificial Sequence: Synthetic oligonucleotide
ccccucccauauuu

SEQ ID NO: 34675 - RNA, 14 nt, Artificial Sequence
  Description of Artificial Sequence: Synthetic oligonucleotide
accccucccauauu

SEQ ID NO: 34676 - RNA, 14 nt, Artificial Sequence
  Description of Artificial Sequence: Synthetic oligonucleotide
uaccccucccauau

SEQ ID NO: 34677 - RNA, 14 nt, Artificial Sequence
  Description of Artificial Sequence: Synthetic oligonucleotide
auaccccucccaua

SEQ ID NO: 34678 - RNA, 14 nt, Artificial Sequence
  Description of Artificial Sequence: Synthetic oligonucleotide
uauaccccucccau

SEQ ID NO: 34679 - RNA, 14 nt, Artificial Sequence
  Description of Artificial Sequence: Synthetic oligonucleotide
auauaccccuccca

SEQ ID NO: 34680 - RNA, 14 nt, Artificial Sequence
  Description of Artificial Sequence: Synthetic oligonucleotide
cauauaccccuccc

SEQ ID NO: 34681 - RNA, 14 nt, Artificial Sequence
  Description of Artificial Sequence: Synthetic oligonucleotide
ccauauaccccucc

SEQ ID NO: 34682 - RNA, 14 nt, Artificial Sequence
  Description of Artificial Sequence: Synthetic oligonucleotide
accauauaccccuc

SEQ ID NO: 34683 - RNA, 14 nt, Artificial Sequence
  Description of Artificial Sequence: Synthetic oligonucleotide
caccauauaccccu

SEQ ID NO: 34684 - RNA, 14 nt, Artificial Sequence
  Description of Artificial Sequence: Synthetic oligonucleotide
acaccauauacccc

SEQ ID NO: 34685 - RNA, 14 nt, Artificial Sequence
  Description of Artificial Sequence: Synthetic oligonucleotide
aacaccauauaccc

SEQ ID NO: 34686 - RNA, 14 nt, Artificial Sequence
  Description of Artificial Sequence: Synthetic oligonucleotide
uaacaccauauacc

SEQ ID NO: 34687 - RNA, 14 nt, Artificial Sequence
  Description of Artificial Sequence: Synthetic oligonucleotide
guaacaccauauac

SEQ ID NO: 34688 - RNA, 14 nt, Artificial Sequence
  Description of Artificial Sequence: Synthetic oligonucleotide
aguaacaccauaua

SEQ ID NO: 34689 - RNA, 14 nt, Artificial Sequence
  Description of Artificial Sequence: Synthetic oligonucleotide
caguaacaccauau

SEQ ID NO: 34690 - RNA, 14 nt, Artificial Sequence
  Description of Artificial Sequence: Synthetic oligonucleotide
ucaguaacaccaua

SEQ ID NO: 34691 - RNA, 14 nt, Artificial Sequence
  Description of Artificial Sequence: Synthetic oligonucleotide
aucaguaacaccau

SEQ ID NO: 34692 - RNA, 14 nt, Artificial Sequence
  Description of Artificial Sequence: Synthetic oligonucleotide
aaucaguaacacca

SEQ ID NO: 34693 - RNA, 14 nt, Artificial Sequence
  Description of Artificial Sequence: Synthetic oligonucleotide
aaaucaguaacacc

SEQ ID NO: 34694 - RNA, 14 nt, Artificial Sequence
  Description of Artificial Sequence: Synthetic oligonucleotide
aaaaucaguaacac

SEQ ID NO: 34695 - RNA, 14 nt, Artificial Sequence
  Description of Artificial Sequence: Synthetic oligonucleotide
aaaaaucaguaaca

SEQ ID NO: 34696 - RNA, 14 nt, Artificial Sequence
  Description of Artificial Sequence: Synthetic oligonucleotide
uaaaaaucaguaac

SEQ ID NO: 34697 - RNA, 14 nt, Artificial Sequence
  Description of Artificial Sequence: Synthetic oligonucleotide
uuaaaaaucaguaa

SEQ ID NO: 34698 - RNA, 14 nt, Artificial Sequence
  Description of Artificial Sequence: Synthetic oligonucleotide
uuuaaaaaucagua

SEQ ID NO: 34699 - RNA, 14 nt, Artificial Sequence
  Description of Artificial Sequence: Synthetic oligonucleotide
guuuaaaaaucagu

SEQ ID NO: 34700 - RNA, 14 nt, Artificial Sequence
  Description of Artificial Sequence: Synthetic oligonucleotide
gguuuaaaaaucag

SEQ ID NO: 34701 - RNA, 14 nt, Artificial Sequence
  Description of Artificial Sequence: Synthetic oligonucleotide
agguuuaaaaauca

SEQ ID NO: 34702 - RNA, 14 nt, Artificial Sequence
  Description of Artificial Sequence: Synthetic oligonucleotide
gagguuuaaaaauc

SEQ ID NO: 34703 - RNA, 14 nt, Artificial Sequence
  Description of Artificial Sequence: Synthetic oligonucleotide
agagguuuaaaaau

SEQ ID NO: 34704 - RNA, 14 nt, Artificial Sequence
  Description of Artificial Sequence: Synthetic oligonucleotide
aagagguuuaaaaa

SEQ ID NO: 34705 - RNA, 14 nt, Artificial Sequence
  Description of Artificial Sequence: Synthetic oligonucleotide
aaagagguuuaaaa

SEQ ID NO: 34706 - RNA, 14 nt, Artificial Sequence
  Description of Artificial Sequence: Synthetic oligonucleotide
caaagagguuuaaa

SEQ ID NO: 34707 - RNA, 14 nt, Artificial Sequence
  Description of Artificial Sequence: Synthetic oligonucleotide
ucaaagagguuuaa

SEQ ID NO: 34708 - RNA, 14 nt, Artificial Sequence
  Description of Artificial Sequence: Synthetic oligonucleotide
gucaaagagguuua

SEQ ID NO: 34709 - RNA, 14 nt, Artificial Sequence
  Description of Artificial Sequence: Synthetic oligonucleotide
ggucaaagagguuu

SEQ ID NO: 34710 - RNA, 14 nt, Artificial Sequence
  Description of Artificial Sequence: Synthetic oligonucleotide
uggucaaagagguu

SEQ ID NO: 34711 - RNA, 14 nt, Artificial Sequence
  Description of Artificial Sequence: Synthetic oligonucleotide
auggucaaagaggu

SEQ ID NO: 34712 - RNA, 14 nt, Artificial Sequence
  Description of Artificial Sequence: Synthetic oligonucleotide
gauggucaaagagg

SEQ ID NO: 34713 - RNA, 14 nt, Artificial Sequence
  Description of Artificial Sequence: Synthetic oligonucleotide
agauggucaaagag

SEQ ID NO: 34714 - RNA, 14 nt, Artificial Sequence
  Description of Artificial Sequence: Synthetic oligonucleotide
aagauggucaaaga

SEQ ID NO: 34715 - RNA, 14 nt, Artificial Sequence
  Description of Artificial Sequence: Synthetic oligonucleotide
gaagauggucaaag

SEQ ID NO: 34716 - RNA, 14 nt, Artificial Sequence
  Description of Artificial Sequence: Synthetic oligonucleotide
agaagauggucaaa

SEQ ID NO: 34717 - RNA, 14 nt, Artificial Sequence
  Description of Artificial Sequence: Synthetic oligonucleotide
uagaagauggucaa

SEQ ID NO: 34718 - RNA, 14 nt, Artificial Sequence
  Description of Artificial Sequence: Synthetic oligonucleotide
cuagaagaugguca

SEQ ID NO: 34719 - RNA, 14 nt, Artificial Sequence
  Description of Artificial Sequence: Synthetic oligonucleotide
acuagaagaugguc

SEQ ID NO: 34720 - RNA, 14 nt, Artificial Sequence
  Description of Artificial Sequence: Synthetic oligonucleotide
aacuagaagauggu

SEQ ID NO: 34721 - RNA, 14 nt, Artificial Sequence
  Description of Artificial Sequence: Synthetic oligonucleotide
aaacuagaagaugg

SEQ ID NO: 34722 - RNA, 14 nt, Artificial Sequence
  Description of Artificial Sequence: Synthetic oligonucleotide
aaaacuagaagaug

SEQ ID NO: 34723 - RNA, 14 nt, Artificial Sequence
  Description of Artificial Sequence: Synthetic oligonucleotide
aaaaacuagaagau

SEQ ID NO: 34724 - RNA, 14 nt, Artificial Sequence
  Description of Artificial Sequence: Synthetic oligonucleotide
uaaaaacuagaaga

SEQ ID NO: 34725 - RNA, 14 nt, Artificial Sequence
  Description of Artificial Sequence: Synthetic oligonucleotide
guaaaaacuagaag

SEQ ID NO: 34726 - RNA, 14 nt, Artificial Sequence
  Description of Artificial Sequence: Synthetic oligonucleotide
aguaaaaacuagaa

SEQ ID NO: 34727 - RNA, 14 nt, Artificial Sequence
  Description of Artificial Sequence: Synthetic oligonucleotide
aaguaaaaacuaga

SEQ ID NO: 34728 - RNA, 14 nt, Artificial Sequence
  Description of Artificial Sequence: Synthetic oligonucleotide
gaaguaaaaacuag

SEQ ID NO: 34729 - RNA, 14 nt, Artificial Sequence
  Description of Artificial Sequence: Synthetic oligonucleotide
agaaguaaaaacua

SEQ ID NO: 34730 - RNA, 14 nt, Artificial Sequence
  Description of Artificial Sequence: Synthetic oligonucleotide
uagaaguaaaaacu

SEQ ID NO: 34731 - RNA, 14 nt, Artificial Sequence
  Description of Artificial Sequence: Synthetic oligonucleotide
cuagaaguaaaaac

SEQ ID NO: 34732 - RNA, 14 nt, Artificial Sequence
  Description of Artificial Sequence: Synthetic oligonucleotide
acuagaaguaaaaa

SEQ ID NO: 34733 - RNA, 14 nt, Artificial Sequence
  Description of Artificial Sequence: Synthetic oligonucleotide
aacuagaaguaaaa

SEQ ID NO: 34734 - RNA, 14 nt, Artificial Sequence
  Description of Artificial Sequence: Synthetic oligonucleotide
aaacuagaaguaaa

SEQ ID NO: 34735 - RNA, 14 nt, Artificial Sequence
  Description of Artificial Sequence: Synthetic oligonucleotide
aaaacuagaaguaa

SEQ ID NO: 34736 - RNA, 14 nt, Artificial Sequence
  Description of Artificial Sequence: Synthetic oligonucleotide
aaaaacuagaagua

SEQ ID NO: 34737 - RNA, 14 nt, Artificial Sequence
  Description of Artificial Sequence: Synthetic oligonucleotide
uaaaaacuagaagu

SEQ ID NO: 34738 - skipped

SEQ ID NO: 34739 - RNA, 14 nt, Artificial Sequence
  Description of Artificial Sequence: Synthetic oligonucleotide
uguaaaaacuagaa

SEQ ID NO: 34740 - RNA, 14 nt, Artificial Sequence
  Description of Artificial Sequence: Synthetic oligonucleotide
auguaaaaacuaga

SEQ ID NO: 34741 - RNA, 14 nt, Artificial Sequence
  Description of Artificial Sequence: Synthetic oligonucleotide
gauguaaaaacuag

SEQ ID NO: 34742 - RNA, 14 nt, Artificial Sequence
  Description of Artificial Sequence: Synthetic oligonucleotide
agauguaaaaacua

SEQ ID NO: 34743 - RNA, 14 nt, Artificial Sequence
  Description of Artificial Sequence: Synthetic oligonucleotide
uagauguaaaaacu

SEQ ID NO: 34744 - RNA, 14 nt, Artificial Sequence
  Description of Artificial Sequence: Synthetic oligonucleotide
cuagauguaaaaac

SEQ ID NO: 34745 - RNA, 14 nt, Artificial Sequence
  Description of Artificial Sequence: Synthetic oligonucleotide
ccuagauguaaaaa

SEQ ID NO: 34746 - RNA, 14 nt, Artificial Sequence
  Description of Artificial Sequence: Synthetic oligonucleotide
uccuagauguaaaa

SEQ ID NO: 34747 - RNA, 14 nt, Artificial Sequence
  Description of Artificial Sequence: Synthetic oligonucleotide
cuccuagauguaaa

SEQ ID NO: 34748 - RNA, 14 nt, Artificial Sequence
  Description of Artificial Sequence: Synthetic oligonucleotide
ucuccuagauguaa

SEQ ID NO: 34749 - RNA, 14 nt, Artificial Sequence
  Description of Artificial Sequence: Synthetic oligonucleotide
uucuccuagaugua

SEQ ID NO: 34750 - RNA, 14 nt, Artificial Sequence
  Description of Artificial Sequence: Synthetic oligonucleotide
auucuccuagaugu

SEQ ID NO: 34751 - RNA, 14 nt, Artificial Sequence
  Description of Artificial Sequence: Synthetic oligonucleotide
aauucuccuagaug

SEQ ID NO: 34752 - RNA, 14 nt, Artificial Sequence
  Description of Artificial Sequence: Synthetic oligonucleotide
caauucuccuagau

SEQ ID NO: 34753 - RNA, 14 nt, Artificial Sequence
  Description of Artificial Sequence: Synthetic oligonucleotide
acaauucuccuaga

SEQ ID NO: 34754 - RNA, 14 nt, Artificial Sequence
  Description of Artificial Sequence: Synthetic oligonucleotide
cacaauucuccuag

SEQ ID NO: 34755 - RNA, 14 nt, Artificial Sequence
  Description of Artificial Sequence: Synthetic oligonucleotide
ucacaauucuccua

SEQ ID NO: 34756 - RNA, 14 nt, Artificial Sequence
  Description of Artificial Sequence: Synthetic oligonucleotide
uucacaauucuccu

SEQ ID NO: 34757 - RNA, 14 nt, Artificial Sequence
  Description of Artificial Sequence: Synthetic oligonucleotide
auucacaauucucc

SEQ ID NO: 34758 - RNA, 14 nt, Artificial Sequence
  Description of Artificial Sequence: Synthetic oligonucleotide
uauucacaauucuc

SEQ ID NO: 34759 - RNA, 14 nt, Artificial Sequence
  Description of Artificial Sequence: Synthetic oligonucleotide
uuauucacaauucu

SEQ ID NO: 34760 - RNA, 14 nt, Artificial Sequence
  Description of Artificial Sequence: Synthetic oligonucleotide
guuauucacaauuc

SEQ ID NO: 34761 - RNA, 14 nt, Artificial Sequence
  Description of Artificial Sequence: Synthetic oligonucleotide
uguuauucacaauu

SEQ ID NO: 34762 - RNA, 14 nt, Artificial Sequence
  Description of Artificial Sequence: Synthetic oligonucleotide
guguuauucacaau

SEQ ID NO: 34763 - RNA, 14 nt, Artificial Sequence
  Description of Artificial Sequence: Synthetic oligonucleotide
gguguuauucacaa

SEQ ID NO: 34764 - RNA, 14 nt, Artificial Sequence
  Description of Artificial Sequence: Synthetic oligonucleotide
ugguguuauucaca

SEQ ID NO: 34765 - RNA, 14 nt, Artificial Sequence
  Description of Artificial Sequence: Synthetic oligonucleotide
uugguguuauucac

SEQ ID NO: 34766 - RNA, 14 nt, Artificial Sequence
  Description of Artificial Sequence: Synthetic oligonucleotide
guugguguuauuca

SEQ ID NO: 34767 - RNA, 14 nt, Artificial Sequence
  Description of Artificial Sequence: Synthetic oligonucleotide
aguugguguuauuc

SEQ ID NO: 34768 - RNA, 14 nt, Artificial Sequence
  Description of Artificial Sequence: Synthetic oligonucleotide
caguugguguuauu

SEQ ID NO: 34769 - RNA, 14 nt, Artificial Sequence
  Description of Artificial Sequence: Synthetic oligonucleotide
acaguugguguuau

SEQ ID NO: 34770 - RNA, 14 nt, Artificial Sequence
  Description of Artificial Sequence: Synthetic oligonucleotide
aacaguugguguua

SEQ ID NO: 34771 - RNA, 14 nt, Artificial Sequence
  Description of Artificial Sequence: Synthetic oligonucleotide
gaacaguugguguu

SEQ ID NO: 34772 - RNA, 14 nt, Artificial Sequence
  Description of Artificial Sequence: Synthetic oligonucleotide
agaacaguuggugu

SEQ ID NO: 34773 - RNA, 14 nt, Artificial Sequence
  Description of Artificial Sequence: Synthetic oligonucleotide
aagaacaguuggug

SEQ ID NO: 34774 - RNA, 14 nt, Artificial Sequence
  Description of Artificial Sequence: Synthetic oligonucleotide
uaagaacaguuggu

SEQ ID NO: 34775 - RNA, 14 nt, Artificial Sequence
  Description of Artificial Sequence: Synthetic oligonucleotide
uuaagaacaguugg

SEQ ID NO: 34776 - RNA, 14 nt, Artificial Sequence
  Description of Artificial Sequence: Synthetic oligonucleotide
uuuaagaacaguug

SEQ ID NO: 34777 - RNA, 14 nt, Artificial Sequence
  Description of Artificial Sequence: Synthetic oligonucleotide
guuuaagaacaguu

SEQ ID NO: 34778 - RNA, 14 nt, Artificial Sequence
  Description of Artificial Sequence: Synthetic oligonucleotide
aguuuaagaacagu

SEQ ID NO: 34779 - RNA, 14 nt, Artificial Sequence
  Description of Artificial Sequence: Synthetic oligonucleotide
gaguuuaagaacag

SEQ ID NO: 34780 - RNA, 14 nt, Artificial Sequence
  Description of Artificial Sequence: Synthetic oligonucleotide
agaguuuaagaaca

SEQ ID NO: 34781 - RNA, 14 nt, Artificial Sequence
  Description of Artificial Sequence: Synthetic oligonucleotide
aagaguuuaagaac

SEQ ID NO: 34782 - RNA, 14 nt, Artificial Sequence
  Description of Artificial Sequence: Synthetic oligonucleotide
aaagaguuuaagaa

SEQ ID NO: 34783 - RNA, 14 nt, Artificial Sequence
  Description of Artificial Sequence: Synthetic oligonucleotide
uaaagaguuuaaga

SEQ ID NO: 34784 - RNA, 14 nt, Artificial Sequence
  Description of Artificial Sequence: Synthetic oligonucleotide
uuaaagaguuuaag

SEQ ID NO: 34785 - RNA, 14 nt, Artificial Sequence
  Description of Artificial Sequence: Synthetic oligonucleotide
auuaaagaguuuaa

SEQ ID NO: 34786 - RNA, 14 nt, Artificial Sequence
  Description of Artificial Sequence: Synthetic oligonucleotide
cauuaaagaguuua

SEQ ID NO: 34787 - RNA, 14 nt, Artificial Sequence
  Description of Artificial Sequence: Synthetic oligonucleotide
gcauuaaagaguuu

SEQ ID NO: 34788 - RNA, 14 nt, Artificial Sequence
  Description of Artificial Sequence: Synthetic oligonucleotide
ggcauuaaagaguu

SEQ ID NO: 34789 - RNA, 14 nt, Artificial Sequence
  Description of Artificial Sequence: Synthetic oligonucleotide
uggcauuaaagagu

SEQ ID NO: 34790 - RNA, 14 nt, Artificial Sequence
  Description of Artificial Sequence: Synthetic oligonucleotide
auggcauuaaagag

SEQ ID NO: 34791 - RNA, 14 nt, Artificial Sequence
  Description of Artificial Sequence: Synthetic oligonucleotide
cauggcauuaaaga

SEQ ID NO: 34792 - RNA, 14 nt, Artificial Sequence
  Description of Artificial Sequence: Synthetic oligonucleotide
acauggcauuaaag

SEQ ID NO: 34793 - RNA, 14 nt, Artificial Sequence
  Description of Artificial Sequence: Synthetic oligonucleotide
gacauggcauuaaa

SEQ ID NO: 34794 - RNA, 14 nt, Artificial Sequence
  Description of Artificial Sequence: Synthetic oligonucleotide
agacauggcauuaa

SEQ ID NO: 34795 - RNA, 14 nt, Artificial Sequence
  Description of Artificial Sequence: Synthetic oligonucleotide
aagacauggcauua

SEQ ID NO: 34796 - RNA, 14 nt, Artificial Sequence
  Description of Artificial Sequence: Synthetic oligonucleotide
uaagacauggcauu

SEQ ID NO: 34797 - RNA, 14 nt, Artificial Sequence
  Description of Artificial Sequence: Synthetic oligonucleotide
uuaagacauggcau

SEQ ID NO: 34798 - RNA, 14 nt, Artificial Sequence
  Description of Artificial Sequence: Synthetic oligonucleotide
uuuaagacauggca

SEQ ID NO: 34799 - RNA, 14 nt, Artificial Sequence
  Description of Artificial Sequence: Synthetic oligonucleotide
auuuaagacauggc

SEQ ID NO: 34800 - RNA, 14 nt, Artificial Sequence
  Description of Artificial Sequence: Synthetic oligonucleotide
cauuuaagacaugg

SEQ ID NO: 34801 - RNA, 14 nt, Artificial Sequence
  Description of Artificial Sequence: Synthetic oligonucleotide
gcauuuaagacaug

SEQ ID NO: 34802 - RNA, 14 nt, Artificial Sequence
  Description of Artificial Sequence: Synthetic oligonucleotide
ggcauuuaagacau

SEQ ID NO: 34803 - RNA, 14 nt, Artificial Sequence
  Description of Artificial Sequence: Synthetic oligonucleotide
cggcauuuaagaca

SEQ ID NO: 34804 - RNA, 14 nt, Artificial Sequence
  Description of Artificial Sequence: Synthetic oligonucleotide
ccggcauuuaagac

SEQ ID NO: 34805 - RNA, 14 nt, Artificial Sequence
  Description of Artificial Sequence: Synthetic oligonucleotide
accggcauuuaaga

SEQ ID NO: 34806 - RNA, 14 nt, Artificial Sequence
  Description of Artificial Sequence: Synthetic oligonucleotide
uaccggcauuuaag

SEQ ID NO: 34807 - RNA, 14 nt, Artificial Sequence
  Description of Artificial Sequence: Synthetic oligonucleotide
auaccggcauuuaa

SEQ ID NO: 34808 - RNA, 14 nt, Artificial Sequence
  Description of Artificial Sequence: Synthetic oligonucleotide
aauaccggcauuua

SEQ ID NO: 34809 - RNA, 14 nt, Artificial Sequence
  Description of Artificial Sequence: Synthetic oligonucleotide
aaauaccggcauuu

SEQ ID NO: 34810 - RNA, 14 nt, Artificial Sequence
  Description of Artificial Sequence: Synthetic oligonucleotide
caaauaccggcauu

SEQ ID NO: 34811 - RNA, 14 nt, Artificial Sequence
  Description of Artificial Sequence: Synthetic oligonucleotide
gcaaauaccggcau

SEQ ID NO: 34812 - RNA, 14 nt, Artificial Sequence
  Description of Artificial Sequence: Synthetic oligonucleotide
agcaaauaccggca

SEQ ID NO: 34813 - RNA, 14 nt, Artificial Sequence
  Description of Artificial Sequence: Synthetic oligonucleotide
cagcaaauaccggc

SEQ ID NO: 34814 - RNA, 14 nt, Artificial Sequence
  Description of Artificial Sequence: Synthetic oligonucleotide
gcagcaaauaccgg

SEQ ID NO: 34815 - RNA, 14 nt, Artificial Sequence
  Description of Artificial Sequence: Synthetic oligonucleotide
agcagcaaauaccg

SEQ ID NO: 34816 - RNA, 14 nt, Artificial Sequence
  Description of Artificial Sequence: Synthetic oligonucleotide
cagcagcaaauacc

SEQ ID NO: 34817 - RNA, 14 nt, Artificial Sequence
  Description of Artificial Sequence: Synthetic oligonucleotide
ucagcagcaaauac

SEQ ID NO: 34818 - RNA, 14 nt, Artificial Sequence
  Description of Artificial Sequence: Synthetic oligonucleotide
uucagcagcaaaua

SEQ ID NO: 34819 - RNA, 14 nt, Artificial Sequence
  Description of Artificial Sequence: Synthetic oligonucleotide
cuucagcagcaaau

SEQ ID NO: 34820 - RNA, 14 nt, Artificial Sequence
  Description of Artificial Sequence: Synthetic oligonucleotide
ucuucagcagcaaa

SEQ ID NO: 34821 - RNA, 14 nt, Artificial Sequence
  Description of Artificial Sequence: Synthetic oligonucleotide
gucuucagcagcaa

SEQ ID NO: 34822 - RNA, 14 nt, Artificial Sequence
  Description of Artificial Sequence: Synthetic oligonucleotide
ugucuucagcagca

SEQ ID NO: 34823 - RNA, 14 nt, Artificial Sequence
  Description of Artificial Sequence: Synthetic oligonucleotide
uugucuucagcagc

SEQ ID NO: 34824 - RNA, 14 nt, Artificial Sequence
  Description of Artificial Sequence: Synthetic oligonucleotide
uuugucuucagcag

SEQ ID NO: 34825 - RNA, 14 nt, Artificial Sequence
  Description of Artificial Sequence: Synthetic oligonucleotide
uuuugucuucagca

SEQ ID NO: 34826 - RNA, 14 nt, Artificial Sequence
  Description of Artificial Sequence: Synthetic oligonucleotide
uuuuugucuucagc

SEQ ID NO: 34827 - RNA, 14 nt, Artificial Sequence
  Description of Artificial Sequence: Synthetic oligonucleotide
auuuuugucuucag

SEQ ID NO: 34828 - RNA, 14 nt, Artificial Sequence
  Description of Artificial Sequence: Synthetic oligonucleotide
cauuuuugucuuca

SEQ ID NO: 34829 - RNA, 14 nt, Artificial Sequence
  Description of Artificial Sequence: Synthetic oligonucleotide
ucauuuuugucuuc

SEQ ID NO: 34830 - RNA, 14 nt, Artificial Sequence
  Description of Artificial Sequence: Synthetic oligonucleotide
uucauuuuugucuu

SEQ ID NO: 34831 - RNA, 14 nt, Artificial Sequence
  Description of Artificial Sequence: Synthetic oligonucleotide
uuucauuuuugucu

SEQ ID NO: 34832 - RNA, 14 nt, Artificial Sequence
  Description of Artificial Sequence: Synthetic oligonucleotide
uuuucauuuuuguc

SEQ ID NO: 34833 - RNA, 14 nt, Artificial Sequence
  Description of Artificial Sequence: Synthetic oligonucleotide
cuuuucauuuuugu

SEQ ID NO: 34834 - RNA, 14 nt, Artificial Sequence
  Description of Artificial Sequence: Synthetic oligonucleotide
acuuuucauuuuug

SEQ ID NO: 34835 - RNA, 14 nt, Artificial Sequence
  Description of Artificial Sequence: Synthetic oligonucleotide
uacuuuucauuuuu

SEQ ID NO: 34836 - RNA, 14 nt, Artificial Sequence
  Description of Artificial Sequence: Synthetic oligonucleotide
cuacuuuucauuuu

SEQ ID NO: 34837 - RNA, 14 nt, Artificial Sequence
  Description of Artificial Sequence: Synthetic oligonucleotide
ccuacuuuucauuu

SEQ ID NO: 34838 - RNA, 14 nt, Artificial Sequence
  Description of Artificial Sequence: Synthetic oligonucleotide
uccuacuuuucauu

SEQ ID NO: 34839 - RNA, 14 nt, Artificial Sequence
  Description of Artificial Sequence: Synthetic oligonucleotide
auccuacuuuucau

SEQ ID NO: 34840 - RNA, 14 nt, Artificial Sequence
  Description of Artificial Sequence: Synthetic oligonucleotide
cauccuacuuuuca

SEQ ID NO: 34841 - RNA, 14 nt, Artificial Sequence
  Description of Artificial Sequence: Synthetic oligonucleotide
ucauccuacuuuuc

SEQ ID NO: 34842 - RNA, 14 nt, Artificial Sequence
  Description of Artificial Sequence: Synthetic oligonucleotide
uucauccuacuuuu

SEQ ID NO: 34843 - RNA, 14 nt, Artificial Sequence
  Description of Artificial Sequence: Synthetic oligonucleotide
uuucauccuacuuu

SEQ ID NO: 34844 - RNA, 14 nt, Artificial Sequence
  Description of Artificial Sequence: Synthetic oligonucleotide
uuuucauccuacuu

SEQ ID NO: 34845 - RNA, 14 nt, Artificial Sequence
  Description of Artificial Sequence: Synthetic oligonucleotide
auuuucauccuacu

SEQ ID NO: 34846 - RNA, 14 nt, Artificial Sequence
  Description of Artificial Sequence: Synthetic oligonucleotide
uauuuucauccuac

SEQ ID NO: 34847 - RNA, 14 nt, Artificial Sequence
  Description of Artificial Sequence: Synthetic oligonucleotide
uuauuuucauccua

SEQ ID NO: 34848 - RNA, 14 nt, Artificial Sequence
  Description of Artificial Sequence: Synthetic oligonucleotide
auuauuuucauccu

SEQ ID NO: 34849 - RNA, 14 nt, Artificial Sequence
  Description of Artificial Sequence: Synthetic oligonucleotide
uauuauuuucaucc

SEQ ID NO: 34850 - RNA, 14 nt, Artificial Sequence
  Description of Artificial Sequence: Synthetic oligonucleotide
cuauuauuuucauc

SEQ ID NO: 34851 - RNA, 14 nt, Artificial Sequence
  Description of Artificial Sequence: Synthetic oligonucleotide
ucuauuauuuucau

SEQ ID NO: 34852 - RNA, 14 nt, Artificial Sequence
  Description of Artificial Sequence: Synthetic oligonucleotide
uucuauuauuuuca

SEQ ID NO: 34853 - RNA, 14 nt, Artificial Sequence
  Description of Artificial Sequence: Synthetic oligonucleotide
auucuauuauuuuc

SEQ ID NO: 34854 - RNA, 14 nt, Artificial Sequence
  Description of Artificial Sequence: Synthetic oligonucleotide
cauucuauuauuuu

SEQ ID NO: 34855 - RNA, 14 nt, Artificial Sequence
  Description of Artificial Sequence: Synthetic oligonucleotide
ccauucuauuauuu

SEQ ID NO: 34856 - RNA, 14 nt, Artificial Sequence
  Description of Artificial Sequence: Synthetic oligonucleotide
gccauucuauuauu

SEQ ID NO: 34857 - RNA, 14 nt, Artificial Sequence
  Description of Artificial Sequence: Synthetic oligonucleotide
ugccauucuauuau

SEQ ID NO: 34858 - RNA, 14 nt, Artificial Sequence
  Description of Artificial Sequence: Synthetic oligonucleotide
gugccauucuauua

SEQ ID NO: 34859 - RNA, 14 nt, Artificial Sequence
  Description of Artificial Sequence: Synthetic oligonucleotide
agugccauucuauu

SEQ ID NO: 34860 - RNA, 14 nt, Artificial Sequence
  Description of Artificial Sequence: Synthetic oligonucleotide
cagugccauucuau

SEQ ID NO: 34861 - RNA, 14 nt, Artificial Sequence
  Description of Artificial Sequence: Synthetic oligonucleotide
acagugccauucua

SEQ ID NO: 34862 - RNA, 14 nt, Artificial Sequence
  Description of Artificial Sequence: Synthetic oligonucleotide
uacagugccauucu

SEQ ID NO: 34863 - RNA, 14 nt, Artificial Sequence
  Description of Artificial Sequence: Synthetic oligonucleotide
uuacagugccauuc

SEQ ID NO: 34864 - RNA, 14 nt, Artificial Sequence
  Description of Artificial Sequence: Synthetic oligonucleotide
cuuacagugccauu

SEQ ID NO: 34865 - RNA, 14 nt, Artificial Sequence
  Description of Artificial Sequence: Synthetic oligonucleotide
acuuacagugccau

SEQ ID NO: 34866 - RNA, 14 nt, Artificial Sequence
  Description of Artificial Sequence: Synthetic oligonucleotide
cacuuacagugcca

SEQ ID NO: 34867 - RNA, 14 nt, Artificial Sequence
  Description of Artificial Sequence: Synthetic oligonucleotide
acacuuacagugcc

SEQ ID NO: 34868 - RNA, 14 nt, Artificial Sequence
  Description of Artificial Sequence: Synthetic oligonucleotide
aacacuuacagugc

SEQ ID NO: 34869 - RNA, 14 nt, Artificial Sequence
  Description of Artificial Sequence: Synthetic oligonucleotide
aaacacuuacagug

SEQ ID NO: 34870 - RNA, 14 nt, Artificial Sequence
  Description of Artificial Sequence: Synthetic oligonucleotide
uaaacacuuacagu

SEQ ID NO: 34871 - RNA, 14 nt, Artificial Sequence
  Description of Artificial Sequence: Synthetic oligonucleotide
auaaacacuuacag

SEQ ID NO: 34872 - RNA, 14 nt, Artificial Sequence
  Description of Artificial Sequence: Synthetic oligonucleotide
aauaaacacuuaca

SEQ ID NO: 34873 - RNA, 14 nt, Artificial Sequence
  Description of Artificial Sequence: Synthetic oligonucleotide
uaauaaacacuuac

SEQ ID NO: 34874 - RNA, 14 nt, Artificial Sequence
  Description of Artificial Sequence: Synthetic oligonucleotide
auaauaaacacuua

SEQ ID NO: 34875 - RNA, 14 nt, Artificial Sequence
  Description of Artificial Sequence: Synthetic oligonucleotide
aauaauaaacacuu

SEQ ID NO: 34876 - RNA, 14 nt, Artificial Sequence
  Description of Artificial Sequence: Synthetic oligonucleotide
aaauaauaaacacu

SEQ ID NO: 34877 - RNA, 14 nt, Artificial Sequence
  Description of Artificial Sequence: Synthetic oligonucleotide
aaaauaauaaacac

SEQ ID NO: 34878 - RNA, 14 nt, Artificial Sequence
  Description of Artificial Sequence: Synthetic oligonucleotide
caaaauaauaaaca

SEQ ID NO: 34879 - RNA, 14 nt, Artificial Sequence
  Description of Artificial Sequence: Synthetic oligonucleotide
acaaaauaauaaac

SEQ ID NO: 34880 - RNA, 14 nt, Artificial Sequence
  Description of Artificial Sequence: Synthetic oligonucleotide
gacaaaauaauaaa

SEQ ID NO: 34881 - RNA, 14 nt, Artificial Sequence
  Description of Artificial Sequence: Synthetic oligonucleotide
ugacaaaauaauaa

SEQ ID NO: 34882 - RNA, 14 nt, Artificial Sequence
  Description of Artificial Sequence: Synthetic oligonucleotide
uugacaaaauaaua

SEQ ID NO: 34883 - RNA, 14 nt, Artificial Sequence
  Description of Artificial Sequence: Synthetic oligonucleotide
uuugacaaaauaau

SEQ ID NO: 34884 - RNA, 14 nt, Artificial Sequence
  Description of Artificial Sequence: Synthetic oligonucleotide
uuuugacaaaauaa

SEQ ID NO: 34885 - RNA, 14 nt, Artificial Sequence
  Description of Artificial Sequence: Synthetic oligonucleotide
auuuugacaaaaua

SEQ ID NO: 34886 - RNA, 14 nt, Artificial Sequence
  Description of Artificial Sequence: Synthetic oligonucleotide
cauuuugacaaaau

SEQ ID NO: 34887 - RNA, 14 nt, Artificial Sequence
  Description of Artificial Sequence: Synthetic oligonucleotide
acauuuugacaaaa

SEQ ID NO: 34888 - RNA, 14 nt, Artificial Sequence
  Description of Artificial Sequence: Synthetic oligonucleotide
uacauuuugacaaa

SEQ ID NO: 34889 - RNA, 14 nt, Artificial Sequence
  Description of Artificial Sequence: Synthetic oligonucleotide
uuacauuuugacaa

SEQ ID NO: 34890 - RNA, 14 nt, Artificial Sequence
  Description of Artificial Sequence: Synthetic oligonucleotide
uuuacauuuugaca

SEQ ID NO: 34891 - RNA, 14 nt, Artificial Sequence
  Description of Artificial Sequence: Synthetic oligonucleotide
guuuacauuuugac

SEQ ID NO: 34892 - RNA, 14 nt, Artificial Sequence
  Description of Artificial Sequence: Synthetic oligonucleotide
uguuuacauuuuga

SEQ ID NO: 34893 - RNA, 14 nt, Artificial Sequence
  Description of Artificial Sequence: Synthetic oligonucleotide
uuguuuacauuuug

SEQ ID NO: 34894 - RNA, 14 nt, Artificial Sequence
  Description of Artificial Sequence: Synthetic oligonucleotide
uuuguuuacauuuu

SEQ ID NO: 34895 - RNA, 14 nt, Artificial Sequence
  Description of Artificial Sequence: Synthetic oligonucleotide
cuuuguuuacauuu

SEQ ID NO: 34896 - RNA, 14 nt, Artificial Sequence
  Description of Artificial Sequence: Synthetic oligonucleotide
ucuuuguuuacauu

SEQ ID NO: 34897 - RNA, 14 nt, Artificial Sequence
  Description of Artificial Sequence: Synthetic oligonucleotide
gucuuuguuuacau

SEQ ID NO: 34898 - RNA, 14 nt, Artificial Sequence
  Description of Artificial Sequence: Synthetic oligonucleotide
agucuuuguuuaca

SEQ ID NO: 34899 - RNA, 14 nt, Artificial Sequence
  Description of Artificial Sequence: Synthetic oligonucleotide
uagucuuuguuuac

SEQ ID NO: 34900 - RNA, 14 nt, Artificial Sequence
  Description of Artificial Sequence: Synthetic oligonucleotide
guagucuuuguuua

SEQ ID NO: 34901 - RNA, 14 nt, Artificial Sequence
  Description of Artificial Sequence: Synthetic oligonucleotide
uguagucuuuguuu

SEQ ID NO: 34902 - RNA, 14 nt, Artificial Sequence
  Description of Artificial Sequence: Synthetic oligonucleotide
auguagucuuuguu

SEQ ID NO: 34903 - RNA, 14 nt, Artificial Sequence
  Description of Artificial Sequence: Synthetic oligonucleotide
uauguagucuuugu

SEQ ID NO: 34904 - RNA, 14 nt, Artificial Sequence
  Description of Artificial Sequence: Synthetic oligonucleotide
uuauguagucuuug

SEQ ID NO: 34905 - RNA, 14 nt, Artificial Sequence
  Description of Artificial Sequence: Synthetic oligonucleotide
guuauguagucuuu

SEQ ID NO: 34906 - RNA, 14 nt, Artificial Sequence
  Description of Artificial Sequence: Synthetic oligonucleotide
gguuauguagucuu

SEQ ID NO: 34907 - RNA, 14 nt, Artificial Sequence
  Description of Artificial Sequence: Synthetic oligonucleotide
ggguuauguagucu

SEQ ID NO: 34908 - RNA, 14 nt, Artificial Sequence
  Description of Artificial Sequence: Synthetic oligonucleotide
uggguuauguaguc

SEQ ID NO: 34909 - RNA, 14 nt, Artificial Sequence
  Description of Artificial Sequence: Synthetic oligonucleotide
uuggguuauguagu

SEQ ID NO: 34910 - RNA, 14 nt, Artificial Sequence
  Description of Artificial Sequence: Synthetic oligonucleotide
auuggguuauguag

SEQ ID NO: 34911 - RNA, 14 nt, Artificial Sequence
  Description of Artificial Sequence: Synthetic oligonucleotide
cauuggguuaugua

SEQ ID NO: 34912 - RNA, 14 nt, Artificial Sequence
  Description of Artificial Sequence: Synthetic oligonucleotide
ucauuggguuaugu

SEQ ID NO: 34913 - RNA, 14 nt, Artificial Sequence
  Description of Artificial Sequence: Synthetic oligonucleotide
aucauuggguuaug

SEQ ID NO: 34914 - RNA, 14 nt, Artificial Sequence
  Description of Artificial Sequence: Synthetic oligonucleotide
caucauuggguuau

SEQ ID NO: 34915 - RNA, 14 nt, Artificial Sequence
  Description of Artificial Sequence: Synthetic oligonucleotide
ccaucauuggguua

SEQ ID NO: 34916 - RNA, 14 nt, Artificial Sequence
  Description of Artificial Sequence: Synthetic oligonucleotide
uccaucauuggguu

SEQ ID NO: 34917 - RNA, 14 nt, Artificial Sequence
  Description of Artificial Sequence: Synthetic oligonucleotide
cuccaucauugggu

SEQ ID NO: 34918 - RNA, 14 nt, Artificial Sequence
  Description of Artificial Sequence: Synthetic oligonucleotide
ccuccaucauuggg

SEQ ID NO: 34919 - RNA, 14 nt, Artificial Sequence
  Description of Artificial Sequence: Synthetic oligonucleotide
cccuccaucauugg

SEQ ID NO: 34920 - RNA, 14 nt, Artificial Sequence
  Description of Artificial Sequence: Synthetic oligonucleotide
ucccuccaucauug

SEQ ID NO: 34921 - RNA, 14 nt, Artificial Sequence
  Description of Artificial Sequence: Synthetic oligonucleotide
uucccuccaucauu

SEQ ID NO: 34922 - RNA, 14 nt, Artificial Sequence
  Description of Artificial Sequence: Synthetic oligonucleotide
uuucccuccaucau

SEQ ID NO: 34923 - RNA, 14 nt, Artificial Sequence
  Description of Artificial Sequence: Synthetic oligonucleotide
uuuucccuccauca

SEQ ID NO: 34924 - RNA, 14 nt, Artificial Sequence
  Description of Artificial Sequence: Synthetic oligonucleotide
uuuuucccuccauc

SEQ ID NO: 34925 - RNA, 14 nt, Artificial Sequence
  Description of Artificial Sequence: Synthetic oligonucleotide
cuuuuucccuccau

SEQ ID NO: 34926 - RNA, 14 nt, Artificial Sequence
  Description of Artificial Sequence: Synthetic oligonucleotide
ccuuuuucccucca

SEQ ID NO: 34927 - RNA, 14 nt, Artificial Sequence
  Description of Artificial Sequence: Synthetic oligonucleotide
cccuuuuucccucc

SEQ ID NO: 34928 - RNA, 14 nt, Artificial Sequence
  Description of Artificial Sequence: Synthetic oligonucleotide
gcccuuuuucccuc

SEQ ID NO: 34929 - RNA, 14 nt, Artificial Sequence
  Description of Artificial Sequence: Synthetic oligonucleotide
ugcccuuuuucccu

SEQ ID NO: 34930 - RNA, 14 nt, Artificial Sequence
  Description of Artificial Sequence: Synthetic oligonucleotide
augcccuuuuuccc

SEQ ID NO: 34931 - RNA, 14 nt, Artificial Sequence
  Description of Artificial Sequence: Synthetic oligonucleotide
caugcccuuuuucc

SEQ ID NO: 34932 - RNA, 14 nt, Artificial Sequence
  Description of Artificial Sequence: Synthetic oligonucleotide
acaugcccuuuuuc

SEQ ID NO: 34933 - RNA, 14 nt, Artificial Sequence
  Description of Artificial Sequence: Synthetic oligonucleotide
uacaugcccuuuuu

SEQ ID NO: 34934 - RNA, 14 nt, Artificial Sequence
  Description of Artificial Sequence: Synthetic oligonucleotide
auacaugcccuuuu

SEQ ID NO: 34935 - RNA, 14 nt, Artificial Sequence
  Description of Artificial Sequence: Synthetic oligonucleotide
gauacaugcccuuu

SEQ ID NO: 34936 - RNA, 14 nt, Artificial Sequence
  Description of Artificial Sequence: Synthetic oligonucleotide
agauacaugcccuu

SEQ ID NO: 34937 - RNA, 14 nt, Artificial Sequence
  Description of Artificial Sequence: Synthetic oligonucleotide
gagauacaugcccu

SEQ ID NO: 34938 - RNA, 14 nt, Artificial Sequence
  Description of Artificial Sequence: Synthetic oligonucleotide
ugagauacaugccc

SEQ ID NO: 34939 - RNA, 14 nt, Artificial Sequence
  Description of Artificial Sequence: Synthetic oligonucleotide
augagauacaugcc

SEQ ID NO: 34940 - RNA, 14 nt, Artificial Sequence
  Description of Artificial Sequence: Synthetic oligonucleotide
aaugagauacaugc

SEQ ID NO: 34941 - RNA, 14 nt, Artificial Sequence
  Description of Artificial Sequence: Synthetic oligonucleotide
gaaugagauacaug

SEQ ID NO: 34942 - RNA, 14 nt, Artificial Sequence
  Description of Artificial Sequence: Synthetic oligonucleotide
ugaaugagauacau

SEQ ID NO: 34943 - RNA, 14 nt, Artificial Sequence
  Description of Artificial Sequence: Synthetic oligonucleotide
cugaaugagauaca

SEQ ID NO: 34944 - RNA, 14 nt, Artificial Sequence
  Description of Artificial Sequence: Synthetic oligonucleotide
ucugaaugagauac

SEQ ID NO: 34945 - RNA, 14 nt, Artificial Sequence
  Description of Artificial Sequence: Synthetic oligonucleotide
aucugaaugagaua

SEQ ID NO: 34946 - RNA, 14 nt, Artificial Sequence
  Description of Artificial Sequence: Synthetic oligonucleotide
caucugaaugagau

SEQ ID NO: 34947 - RNA, 14 nt, Artificial Sequence
  Description of Artificial Sequence: Synthetic oligonucleotide
acaucugaaugaga

SEQ ID NO: 34948 - RNA, 14 nt, Artificial Sequence
  Description of Artificial Sequence: Synthetic oligonucleotide
cacaucugaaugag

SEQ ID NO: 34949 - RNA, 14 nt, Artificial Sequence
  Description of Artificial Sequence: Synthetic oligonucleotide
gcacaucugaauga

SEQ ID NO: 34950 - RNA, 14 nt, Artificial Sequence
  Description of Artificial Sequence: Synthetic oligonucleotide
ggcacaucugaaug

SEQ ID NO: 34951 - RNA, 14 nt, Artificial Sequence
  Description of Artificial Sequence: Synthetic oligonucleotide
aggcacaucugaau

SEQ ID NO: 34952 - RNA, 14 nt, Artificial Sequence
  Description of Artificial Sequence: Synthetic oligonucleotide
aaggcacaucugaa

SEQ ID NO: 34953 - RNA, 14 nt, Artificial Sequence
  Description of Artificial Sequence: Synthetic oligonucleotide
aaaggcacaucuga

SEQ ID NO: 34954 - RNA, 14 nt, Artificial Sequence
  Description of Artificial Sequence: Synthetic oligonucleotide
aaaaggcacaucug

SEQ ID NO: 34955 - RNA, 14 nt, Artificial Sequence
  Description of Artificial Sequence: Synthetic oligonucleotide
caaaaggcacaucu

SEQ ID NO: 34956 - RNA, 14 nt, Artificial Sequence
  Description of Artificial Sequence: Synthetic oligonucleotide
acaaaaggcacauc

SEQ ID NO: 34957 - RNA, 14 nt, Artificial Sequence
  Description of Artificial Sequence: Synthetic oligonucleotide
aacaaaaggcacau

SEQ ID NO: 34958 - DNA, 14 bp, Artificial Sequence
  Description of Artificial Sequence: Synthetic oligonucleotide
aaacaaaaggcaca

SEQ ID NO: 34959 - DNA, 14 bp, Artificial Sequence
  Description of Artificial Sequence: Synthetic oligonucleotide
aaaacaaaaggcac

SEQ ID NO: 34960 - DNA, 14 bp, Artificial Sequence
  Description of Artificial Sequence: Synthetic oligonucleotide
aaaaacaaaaggca

SEQ ID NO: 34961 - DNA, 14 bp, Artificial Sequence
  Description of Artificial Sequence: Synthetic oligonucleotide
caaaaacaaaaggc

SEQ ID NO: 34962 - DNA, 14 bp, Artificial Sequence
  Description of Artificial Sequence: Synthetic oligonucleotide
gcaaaaacaaaagg

SEQ ID NO: 34963 - RNA, 14 nt, Artificial Sequence
  Description of Artificial Sequence: Synthetic oligonucleotide
ugcaaaaacaaaag

SEQ ID NO: 34964 - RNA, 14 nt, Artificial Sequence
  Description of Artificial Sequence: Synthetic oligonucleotide
cugcaaaaacaaaa

SEQ ID NO: 34965 - RNA, 14 nt, Artificial Sequence
  Description of Artificial Sequence: Synthetic oligonucleotide
ucugcaaaaacaaa

SEQ ID NO: 34966 - RNA, 14 nt, Artificial Sequence
  Description of Artificial Sequence: Synthetic oligonucleotide
gucugcaaaaacaa

SEQ ID NO: 34967 - RNA, 14 nt, Artificial Sequence
  Description of Artificial Sequence: Synthetic oligonucleotide
agucugcaaaaaca

SEQ ID NO: 34968 - RNA, 14 nt, Artificial Sequence
  Description of Artificial Sequence: Synthetic oligonucleotide
uagucugcaaaaac

SEQ ID NO: 34969 - RNA, 14 nt, Artificial Sequence
  Description of Artificial Sequence: Synthetic oligonucleotide
auagucugcaaaaa

SEQ ID NO: 34970 - RNA, 14 nt, Artificial Sequence
  Description of Artificial Sequence: Synthetic oligonucleotide
cauagucugcaaaa

SEQ ID NO: 34971 - RNA, 14 nt, Artificial Sequence
  Description of Artificial Sequence: Synthetic oligonucleotide
ucauagucugcaaa

SEQ ID NO: 34972 - RNA, 14 nt, Artificial Sequence
  Description of Artificial Sequence: Synthetic oligonucleotide
gucauagucugcaa

SEQ ID NO: 34973 - RNA, 14 nt, Artificial Sequence
  Description of Artificial Sequence: Synthetic oligonucleotide
cgucauagucugca

SEQ ID NO: 34974 - RNA, 14 nt, Artificial Sequence
  Description of Artificial Sequence: Synthetic oligonucleotide
acgucauagucugc

SEQ ID NO: 34975 - RNA, 14 nt, Artificial Sequence
  Description of Artificial Sequence: Synthetic oligonucleotide
gacgucauagucug

SEQ ID NO: 34976 - RNA, 14 nt, Artificial Sequence
  Description of Artificial Sequence: Synthetic oligonucleotide
agacgucauagucu

SEQ ID NO: 34977 - RNA, 14 nt, Artificial Sequence
  Description of Artificial Sequence: Synthetic oligonucleotide
aagacgucauaguc

SEQ ID NO: 34978 - RNA, 14 nt, Artificial Sequence
  Description of Artificial Sequence: Synthetic oligonucleotide
aaagacgucauagu

SEQ ID NO: 34979 - RNA, 14 nt, Artificial Sequence
  Description of Artificial Sequence: Synthetic oligonucleotide
uaaagacgucauag

SEQ ID NO: 34980 - RNA, 14 nt, Artificial Sequence
  Description of Artificial Sequence: Synthetic oligonucleotide
cuaaagacgucaua

SEQ ID NO: 34981 - RNA, 14 nt, Artificial Sequence
  Description of Artificial Sequence: Synthetic oligonucleotide
gcuaaagacgucau

SEQ ID NO: 34982 - RNA, 14 nt, Artificial Sequence
  Description of Artificial Sequence: Synthetic oligonucleotide
agcuaaagacguca

SEQ ID NO: 34983 - RNA, 14 nt, Artificial Sequence
  Description of Artificial Sequence: Synthetic oligonucleotide
uagcuaaagacguc

SEQ ID NO: 34984 - RNA, 14 nt, Artificial Sequence
  Description of Artificial Sequence: Synthetic oligonucleotide
uuagcuaaagacgu

SEQ ID NO: 34985 - RNA, 14 nt, Artificial Sequence
  Description of Artificial Sequence: Synthetic oligonucleotide
auuagcuaaagacg

SEQ ID NO: 34986 - RNA, 14 nt, Artificial Sequence
  Description of Artificial Sequence: Synthetic oligonucleotide
cauuagcuaaagac

SEQ ID NO: 34987 - RNA, 14 nt, Artificial Sequence
  Description of Artificial Sequence: Synthetic oligonucleotide
ucauuagcuaaaga

SEQ ID NO: 34988 - RNA, 14 nt, Artificial Sequence
  Description of Artificial Sequence: Synthetic oligonucleotide
uucauuagcuaaag

SEQ ID NO: 34989 - RNA, 14 nt, Artificial Sequence
  Description of Artificial Sequence: Synthetic oligonucleotide
auucauuagcuaaa

SEQ ID NO: 34990 - RNA, 14 nt, Artificial Sequence
  Description of Artificial Sequence: Synthetic oligonucleotide
aauucauuagcuaa

SEQ ID NO: 34991 - RNA, 14 nt, Artificial Sequence
  Description of Artificial Sequence: Synthetic oligonucleotide
caauucauuagcua

SEQ ID NO: 34992 - RNA, 14 nt, Artificial Sequence
  Description of Artificial Sequence: Synthetic oligonucleotide
gcaauucauuagcu

SEQ ID NO: 34993 - RNA, 14 nt, Artificial Sequence
  Description of Artificial Sequence: Synthetic oligonucleotide
ggcaauucauuagc

SEQ ID NO: 34994 - RNA, 14 nt, Artificial Sequence
  Description of Artificial Sequence: Synthetic oligonucleotide
aggcaauucauuag

SEQ ID NO: 34995 - RNA, 14 nt, Artificial Sequence
  Description of Artificial Sequence: Synthetic oligonucleotide
uaggcaauucauua

SEQ ID NO: 34996 - RNA, 14 nt, Artificial Sequence
  Description of Artificial Sequence: Synthetic oligonucleotide
auaggcaauucauu

SEQ ID NO: 34997 - RNA, 14 nt, Artificial Sequence
  Description of Artificial Sequence: Synthetic oligonucleotide
aauaggcaauucau

SEQ ID NO: 34998 - RNA, 14 nt, Artificial Sequence
  Description of Artificial Sequence: Synthetic oligonucleotide
caauaggcaauuca

SEQ ID NO: 34999 - RNA, 14 nt, Artificial Sequence
  Description of Artificial Sequence: Synthetic oligonucleotide
acaauaggcaauuc

SEQ ID NO: 35000 - RNA, 14 nt, Artificial Sequence
  Description of Artificial Sequence: Synthetic oligonucleotide
aacaauaggcaauu

SEQ ID NO: 35001 - RNA, 14 nt, Artificial Sequence
  Description of Artificial Sequence: Synthetic oligonucleotide
uaacaauaggcaau

SEQ ID NO: 35002 - RNA, 14 nt, Artificial Sequence
  Description of Artificial Sequence: Synthetic oligonucleotide
auaacaauaggcaa

SEQ ID NO: 35003 - RNA, 14 nt, Artificial Sequence
  Description of Artificial Sequence: Synthetic oligonucleotide
cauaacaauaggca

SEQ ID NO: 35004 - RNA, 14 nt, Artificial Sequence
  Description of Artificial Sequence: Synthetic oligonucleotide
ccauaacaauaggc

SEQ ID NO: 35005 - RNA, 14 nt, Artificial Sequence
  Description of Artificial Sequence: Synthetic oligonucleotide
uccauaacaauagg

SEQ ID NO: 35006 - RNA, 14 nt, Artificial Sequence
  Description of Artificial Sequence: Synthetic oligonucleotide
uuccauaacaauag

SEQ ID NO: 35007 - RNA, 14 nt, Artificial Sequence
  Description of Artificial Sequence: Synthetic oligonucleotide
uuuccauaacaaua

SEQ ID NO: 35008 - RNA, 14 nt, Artificial Sequence
  Description of Artificial Sequence: Synthetic oligonucleotide
uuuuccauaacaau

SEQ ID NO: 35009 - RNA, 14 nt, Artificial Sequence
  Description of Artificial Sequence: Synthetic oligonucleotide
guuuuccauaacaa

SEQ ID NO: 35010 - RNA, 14 nt, Artificial Sequence
  Description of Artificial Sequence: Synthetic oligonucleotide
uguuuuccauaaca

SEQ ID NO: 35011 - RNA, 14 nt, Artificial Sequence
  Description of Artificial Sequence: Synthetic oligonucleotide
cuguuuuccauaac

SEQ ID NO: 35012 - RNA, 14 nt, Artificial Sequence
  Description of Artificial Sequence: Synthetic oligonucleotide
acuguuuuccauaa

SEQ ID NO: 35013 - RNA, 14 nt, Artificial Sequence
  Description of Artificial Sequence: Synthetic oligonucleotide
aacuguuuuccaua

SEQ ID NO: 35014 - RNA, 14 nt, Artificial Sequence
  Description of Artificial Sequence: Synthetic oligonucleotide
uaacuguuuuccau

SEQ ID NO: 35015 - RNA, 14 nt, Artificial Sequence
  Description of Artificial Sequence: Synthetic oligonucleotide
uuaacuguuuucca

SEQ ID NO: 35016 - RNA, 14 nt, Artificial Sequence
  Description of Artificial Sequence: Synthetic oligonucleotide
auuaacuguuuucc

SEQ ID NO: 35017 - RNA, 14 nt, Artificial Sequence
  Description of Artificial Sequence: Synthetic oligonucleotide
uauuaacuguuuuc

SEQ ID NO: 35018 - RNA, 14 nt, Artificial Sequence
  Description of Artificial Sequence: Synthetic oligonucleotide
auauuaacuguuuu

SEQ ID NO: 35019 - RNA, 14 nt, Artificial Sequence
  Description of Artificial Sequence: Synthetic oligonucleotide
cauauuaacuguuu

SEQ ID NO: 35020 - RNA, 14 nt, Artificial Sequence
  Description of Artificial Sequence: Synthetic oligonucleotide
gcauauuaacuguu

SEQ ID NO: 35021 - RNA, 14 nt, Artificial Sequence
  Description of Artificial Sequence: Synthetic oligonucleotide
ggcauauuaacugu

SEQ ID NO: 35022 - RNA, 14 nt, Artificial Sequence
  Description of Artificial Sequence: Synthetic oligonucleotide
uggcauauuaacug

SEQ ID NO: 35023 - RNA, 14 nt, Artificial Sequence
  Description of Artificial Sequence: Synthetic oligonucleotide
auggcauauuaacu

SEQ ID NO: 35024 - RNA, 14 nt, Artificial Sequence
  Description of Artificial Sequence: Synthetic oligonucleotide
cauggcauauuaac

SEQ ID NO: 35025 - RNA, 14 nt, Artificial Sequence
  Description of Artificial Sequence: Synthetic oligonucleotide
acauggcauauuaa

SEQ ID NO: 35026 - RNA, 14 nt, Artificial Sequence
  Description of Artificial Sequence: Synthetic oligonucleotide
uacauggcauauua

SEQ ID NO: 35027 - RNA, 14 nt, Artificial Sequence
  Description of Artificial Sequence: Synthetic oligonucleotide
auacauggcauauu

SEQ ID NO: 35028 - RNA, 14 nt, Artificial Sequence
  Description of Artificial Sequence: Synthetic oligonucleotide
cauacauggcauau

SEQ ID NO: 35029 - RNA, 14 nt, Artificial Sequence
  Description of Artificial Sequence: Synthetic oligonucleotide
acauacauggcaua

SEQ ID NO: 35030 - RNA, 14 nt, Artificial Sequence
  Description of Artificial Sequence: Synthetic oligonucleotide
uacauacauggcau

SEQ ID NO: 35031 - RNA, 14 nt, Artificial Sequence
  Description of Artificial Sequence: Synthetic oligonucleotide
guacauacauggca

SEQ ID NO: 35032 - RNA, 14 nt, Artificial Sequence
  Description of Artificial Sequence: Synthetic oligonucleotide
uguacauacauggc

SEQ ID NO: 35033 - RNA, 14 nt, Artificial Sequence
  Description of Artificial Sequence: Synthetic oligonucleotide
cuguacauacaugg

SEQ ID NO: 35034 - RNA, 14 nt, Artificial Sequence
  Description of Artificial Sequence: Synthetic oligonucleotide
acuguacauacaug

SEQ ID NO: 35035 - RNA, 14 nt, Artificial Sequence
  Description of Artificial Sequence: Synthetic oligonucleotide
aacuguacauacau

SEQ ID NO: 35036 - RNA, 14 nt, Artificial Sequence
  Description of Artificial Sequence: Synthetic oligonucleotide
aaacuguacauaca

SEQ ID NO: 35037 - RNA, 14 nt, Artificial Sequence
  Description of Artificial Sequence: Synthetic oligonucleotide
aaaacuguacauac

SEQ ID NO: 35038 - RNA, 14 nt, Artificial Sequence
  Description of Artificial Sequence: Synthetic oligonucleotide
caaaacuguacaua

SEQ ID NO: 35039 - RNA, 14 nt, Artificial Sequence
  Description of Artificial Sequence: Synthetic oligonucleotide
acaaaacuguacau

SEQ ID NO: 35040 - RNA, 14 nt, Artificial Sequence
  Description of Artificial Sequence: Synthetic oligonucleotide
aacaaaacuguaca

SEQ ID NO: 35041 - RNA, 14 nt, Artificial Sequence
  Description of Artificial Sequence: Synthetic oligonucleotide
aaacaaaacuguac

SEQ ID NO: 35042 - RNA, 14 nt, Artificial Sequence
  Description of Artificial Sequence: Synthetic oligonucleotide
uaaacaaaacugua

SEQ ID NO: 35043 - RNA, 14 nt, Artificial Sequence
  Description of Artificial Sequence: Synthetic oligonucleotide
auaaacaaaacugu

SEQ ID NO: 35044 - RNA, 14 nt, Artificial Sequence
  Description of Artificial Sequence: Synthetic oligonucleotide
uauaaacaaaacug

SEQ ID NO: 35045 - RNA, 14 nt, Artificial Sequence
  Description of Artificial Sequence: Synthetic oligonucleotide
auauaaacaaaacu

SEQ ID NO: 35046 - RNA, 14 nt, Artificial Sequence
  Description of Artificial Sequence: Synthetic oligonucleotide
aauauaaacaaaac

SEQ ID NO: 35047 - RNA, 14 nt, Artificial Sequence
  Description of Artificial Sequence: Synthetic oligonucleotide
caauauaaacaaaa

SEQ ID NO: 35048 - RNA, 14 nt, Artificial Sequence
  Description of Artificial Sequence: Synthetic oligonucleotide
acaauauaaacaaa

SEQ ID NO: 35049 - RNA, 14 nt, Artificial Sequence
  Description of Artificial Sequence: Synthetic oligonucleotide
uacaauauaaacaa

SEQ ID NO: 35050 - RNA, 14 nt, Artificial Sequence
  Description of Artificial Sequence: Synthetic oligonucleotide
auacaauauaaaca

SEQ ID NO: 35051 - RNA, 14 nt, Artificial Sequence
  Description of Artificial Sequence: Synthetic oligonucleotide
uauacaauauaaac

SEQ ID NO: 35052 - RNA, 14 nt, Artificial Sequence
  Description of Artificial Sequence: Synthetic oligonucleotide
auauacaauauaaa

SEQ ID NO: 35053 - RNA, 14 nt, Artificial Sequence
  Description of Artificial Sequence: Synthetic oligonucleotide
aauauacaauauaa

SEQ ID NO: 35054 - RNA, 14 nt, Artificial Sequence
  Description of Artificial Sequence: Synthetic oligonucleotide
aaauauacaauaua

SEQ ID NO: 35055 - RNA, 14 nt, Artificial Sequence
  Description of Artificial Sequence: Synthetic oligonucleotide
uaaauauacaauau

SEQ ID NO: 35056 - RNA, 14 nt, Artificial Sequence
  Description of Artificial Sequence: Synthetic oligonucleotide
uuaaauauacaaua

SEQ ID NO: 35057 - RNA, 14 nt, Artificial Sequence
  Description of Artificial Sequence: Synthetic oligonucleotide
uuuaaauauacaau

SEQ ID NO: 35058 - RNA, 14 nt, Artificial Sequence
  Description of Artificial Sequence: Synthetic oligonucleotide
cuuuaaauauacaa

SEQ ID NO: 35059 - RNA, 14 nt, Artificial Sequence
  Description of Artificial Sequence: Synthetic oligonucleotide
ucuuuaaauauaca

SEQ ID NO: 35060 - RNA, 14 nt, Artificial Sequence
  Description of Artificial Sequence: Synthetic oligonucleotide
aucuuuaaauauac

SEQ ID NO: 35061 - RNA, 14 nt, Artificial Sequence
  Description of Artificial Sequence: Synthetic oligonucleotide
uaucuuuaaauaua

SEQ ID NO: 35062 - RNA, 14 nt, Artificial Sequence
  Description of Artificial Sequence: Synthetic oligonucleotide
guaucuuuaaauau

SEQ ID NO: 35063 - RNA, 14 nt, Artificial Sequence
  Description of Artificial Sequence: Synthetic oligonucleotide
aguaucuuuaaaua

SEQ ID NO: 35064 - RNA, 14 nt, Artificial Sequence
  Description of Artificial Sequence: Synthetic oligonucleotide
caguaucuuuaaau

SEQ ID NO: 35065 - RNA, 14 nt, Artificial Sequence
  Description of Artificial Sequence: Synthetic oligonucleotide
gcaguaucuuuaaa

SEQ ID NO: 35066 - RNA, 14 nt, Artificial Sequence
  Description of Artificial Sequence: Synthetic oligonucleotide
agcaguaucuuuaa

SEQ ID NO: 35067 - RNA, 14 nt, Artificial Sequence
  Description of Artificial Sequence: Synthetic oligonucleotide
uagcaguaucuuua

SEQ ID NO: 35068 - RNA, 14 nt, Artificial Sequence
  Description of Artificial Sequence: Synthetic oligonucleotide
uuagcaguaucuuu

SEQ ID NO: 35069 - RNA, 14 nt, Artificial Sequence
  Description of Artificial Sequence: Synthetic oligonucleotide
auuagcaguaucuu

SEQ ID NO: 35070 - RNA, 14 nt, Artificial Sequence
  Description of Artificial Sequence: Synthetic oligonucleotide
uauuagcaguaucu

SEQ ID NO: 35071 - RNA, 14 nt, Artificial Sequence
  Description of Artificial Sequence: Synthetic oligonucleotide
uuauuagcaguauc

SEQ ID NO: 35072 - RNA, 14 nt, Artificial Sequence
  Description of Artificial Sequence: Synthetic oligonucleotide
guuauuagcaguau

SEQ ID NO: 35073 - RNA, 14 nt, Artificial Sequence
  Description of Artificial Sequence: Synthetic oligonucleotide
gguuauuagcagua

SEQ ID NO: 35074 - RNA, 14 nt, Artificial Sequence
  Description of Artificial Sequence: Synthetic oligonucleotide
agguuauuagcagu

SEQ ID NO: 35075 - RNA, 14 nt, Artificial Sequence
  Description of Artificial Sequence: Synthetic oligonucleotide
uagguuauuagcag

SEQ ID NO: 35076 - RNA, 14 nt, Artificial Sequence
  Description of Artificial Sequence: Synthetic oligonucleotide
auagguuauuagca

SEQ ID NO: 35077 - RNA, 14 nt, Artificial Sequence
  Description of Artificial Sequence: Synthetic oligonucleotide
uauagguuauuagc

SEQ ID NO: 35078 - RNA, 14 nt, Artificial Sequence
  Description of Artificial Sequence: Synthetic oligonucleotide
auauagguuauuag

SEQ ID NO: 35079 - RNA, 14 nt, Artificial Sequence
  Description of Artificial Sequence: Synthetic oligonucleotide
uauauagguuauua

SEQ ID NO: 35080 - RNA, 14 nt, Artificial Sequence
  Description of Artificial Sequence: Synthetic oligonucleotide
uuauauagguuauu

SEQ ID NO: 35081 - RNA, 14 nt, Artificial Sequence
  Description of Artificial Sequence: Synthetic oligonucleotide
uuuauauagguuau

SEQ ID NO: 35082 - RNA, 14 nt, Artificial Sequence
  Description of Artificial Sequence: Synthetic oligonucleotide
auuuauauagguua

SEQ ID NO: 35083 - RNA, 14 nt, Artificial Sequence
  Description of Artificial Sequence: Synthetic oligonucleotide
aauuuauauagguu

SEQ ID NO: 35084 - RNA, 14 nt, Artificial Sequence
  Description of Artificial Sequence: Synthetic oligonucleotide
aaauuuauauaggu

SEQ ID NO: 35085 - RNA, 14 nt, Artificial Sequence
  Description of Artificial Sequence: Synthetic oligonucleotide
uaaauuuauauagg

SEQ ID NO: 35086 - RNA, 14 nt, Artificial Sequence
  Description of Artificial Sequence: Synthetic oligonucleotide
uuaaauuuauauag

SEQ ID NO: 35087 - RNA, 14 nt, Artificial Sequence
  Description of Artificial Sequence: Synthetic oligonucleotide
cuuaaauuuauaua

SEQ ID NO: 35088 - RNA, 14 nt, Artificial Sequence
  Description of Artificial Sequence: Synthetic oligonucleotide
acuuaaauuuauau

SEQ ID NO: 35089 - RNA, 14 nt, Artificial Sequence
  Description of Artificial Sequence: Synthetic oligonucleotide
cacuuaaauuuaua

SEQ ID NO: 35090 - RNA, 14 nt, Artificial Sequence
  Description of Artificial Sequence: Synthetic oligonucleotide
ucacuuaaauuuau

SEQ ID NO: 35091 - RNA, 14 nt, Artificial Sequence
  Description of Artificial Sequence: Synthetic oligonucleotide
gucacuuaaauuua

SEQ ID NO: 35092 - RNA, 14 nt, Artificial Sequence
  Description of Artificial Sequence: Synthetic oligonucleotide
agucacuuaaauuu

SEQ ID NO: 35093 - RNA, 14 nt, Artificial Sequence
  Description of Artificial Sequence: Synthetic oligonucleotide
aagucacuuaaauu

SEQ ID NO: 35094 - RNA, 14 nt, Artificial Sequence
  Description of Artificial Sequence: Synthetic oligonucleotide
caagucacuuaaau

SEQ ID NO: 35095 - RNA, 14 nt, Artificial Sequence
  Description of Artificial Sequence: Synthetic oligonucleotide
ucaagucacuuaaa

SEQ ID NO: 35096 - RNA, 14 nt, Artificial Sequence
  Description of Artificial Sequence: Synthetic oligonucleotide
cucaagucacuuaa

SEQ ID NO: 35097 - RNA, 14 nt, Artificial Sequence
  Description of Artificial Sequence: Synthetic oligonucleotide
ccucaagucacuua

SEQ ID NO: 35098 - RNA, 14 nt, Artificial Sequence
  Description of Artificial Sequence: Synthetic oligonucleotide
gccucaagucacuu

SEQ ID NO: 35099 - RNA, 14 nt, Artificial Sequence
  Description of Artificial Sequence: Synthetic oligonucleotide
ggccucaagucacu

SEQ ID NO: 35100 - RNA, 14 nt, Artificial Sequence
  Description of Artificial Sequence: Synthetic oligonucleotide
aggccucaagucac

SEQ ID NO: 35101 - RNA, 14 nt, Artificial Sequence
  Description of Artificial Sequence: Synthetic oligonucleotide
uaggccucaaguca

SEQ ID NO: 35102 - RNA, 14 nt, Artificial Sequence
  Description of Artificial Sequence: Synthetic oligonucleotide
auaggccucaaguc

SEQ ID NO: 35103 - RNA, 14 nt, Artificial Sequence
  Description of Artificial Sequence: Synthetic oligonucleotide
uauaggccucaagu

SEQ ID NO: 35104 - RNA, 14 nt, Artificial Sequence
  Description of Artificial Sequence: Synthetic oligonucleotide
uuauaggccucaag

SEQ ID NO: 35105 - RNA, 14 nt, Artificial Sequence
  Description of Artificial Sequence: Synthetic oligonucleotide
auuauaggccucaa

SEQ ID NO: 35106 - RNA, 14 nt, Artificial Sequence
  Description of Artificial Sequence: Synthetic oligonucleotide
uauuauaggccuca

SEQ ID NO: 35107 - RNA, 14 nt, Artificial Sequence
  Description of Artificial Sequence: Synthetic oligonucleotide
guauuauaggccuc

SEQ ID NO: 35108 - RNA, 14 nt, Artificial Sequence
  Description of Artificial Sequence: Synthetic oligonucleotide
uguauuauaggccu

SEQ ID NO: 35109 - RNA, 14 nt, Artificial Sequence
  Description of Artificial Sequence: Synthetic oligonucleotide
uuguauuauaggcc

SEQ ID NO: 35110 - RNA, 14 nt, Artificial Sequence
  Description of Artificial Sequence: Synthetic oligonucleotide
auuguauuauaggc

SEQ ID NO: 35111 - RNA, 14 nt, Artificial Sequence
  Description of Artificial Sequence: Synthetic oligonucleotide
gauuguauuauagg

SEQ ID NO: 35112 - RNA, 14 nt, Artificial Sequence
  Description of Artificial Sequence: Synthetic oligonucleotide
agauuguauuauag

SEQ ID NO: 35113 - RNA, 14 nt, Artificial Sequence
  Description of Artificial Sequence: Synthetic oligonucleotide
cagauuguauuaua

SEQ ID NO: 35114 - RNA, 14 nt, Artificial Sequence
  Description of Artificial Sequence: Synthetic oligonucleotide
gcagauuguauuau

SEQ ID NO: 35115 - RNA, 14 nt, Artificial Sequence
  Description of Artificial Sequence: Synthetic oligonucleotide
agcagauuguauua

SEQ ID NO: 35116 - RNA, 14 nt, Artificial Sequence
  Description of Artificial Sequence: Synthetic oligonucleotide
uagcagauuguauu

SEQ ID NO: 35117 - RNA, 14 nt, Artificial Sequence
  Description of Artificial Sequence: Synthetic oligonucleotide
guagcagauuguau

SEQ ID NO: 35118 - RNA, 14 nt, Artificial Sequence
  Description of Artificial Sequence: Synthetic oligonucleotide
aguagcagauugua

SEQ ID NO: 35119 - RNA, 14 nt, Artificial Sequence
  Description of Artificial Sequence: Synthetic oligonucleotide
aaguagcagauugu

SEQ ID NO: 35120 - RNA, 14 nt, Artificial Sequence
  Description of Artificial Sequence: Synthetic oligonucleotide
aaaguagcagauug

SEQ ID NO: 35121 - RNA, 14 nt, Artificial Sequence
  Description of Artificial Sequence: Synthetic oligonucleotide
uaaaguagcagauu

SEQ ID NO: 35122 - RNA, 14 nt, Artificial Sequence
  Description of Artificial Sequence: Synthetic oligonucleotide
guaaaguagcagau

SEQ ID NO: 35123 - RNA, 14 nt, Artificial Sequence
  Description of Artificial Sequence: Synthetic oligonucleotide
aguaaaguagcaga

SEQ ID NO: 35124 - RNA, 14 nt, Artificial Sequence
  Description of Artificial Sequence: Synthetic oligonucleotide
uaguaaaguagcag

SEQ ID NO: 35125 - RNA, 14 nt, Artificial Sequence
  Description of Artificial Sequence: Synthetic oligonucleotide
uuaguaaaguagca

SEQ ID NO: 35126 - RNA, 14 nt, Artificial Sequence
  Description of Artificial Sequence: Synthetic oligonucleotide
auuaguaaaguagc

SEQ ID NO: 35127 - RNA, 14 nt, Artificial Sequence
  Description of Artificial Sequence: Synthetic oligonucleotide
aauuaguaaaguag

SEQ ID NO: 35128 - RNA, 14 nt, Artificial Sequence
  Description of Artificial Sequence: Synthetic oligonucleotide
gaauuaguaaagua

SEQ ID NO: 35129 - RNA, 14 nt, Artificial Sequence
  Description of Artificial Sequence: Synthetic oligonucleotide
ugaauuaguaaagu

SEQ ID NO: 35130 - RNA, 14 nt, Artificial Sequence
  Description of Artificial Sequence: Synthetic oligonucleotide
augaauuaguaaag

SEQ ID NO: 35131 - RNA, 14 nt, Artificial Sequence
  Description of Artificial Sequence: Synthetic oligonucleotide
uaugaauuaguaaa

SEQ ID NO: 35132 - RNA, 14 nt, Artificial Sequence
  Description of Artificial Sequence: Synthetic oligonucleotide
uuaugaauuaguaa

SEQ ID NO: 35133 - RNA, 14 nt, Artificial Sequence
  Description of Artificial Sequence: Synthetic oligonucleotide
uuuaugaauuagua

SEQ ID NO: 35134 - RNA, 14 nt, Artificial Sequence
  Description of Artificial Sequence: Synthetic oligonucleotide
auuuaugaauuagu

SEQ ID NO: 35135 - RNA, 14 nt, Artificial Sequence
  Description of Artificial Sequence: Synthetic oligonucleotide
aauuuaugaauuag

SEQ ID NO: 35136 - RNA, 14 nt, Artificial Sequence
  Description of Artificial Sequence: Synthetic oligonucleotide
gaauuuaugaauua

SEQ ID NO: 35137 - RNA, 14 nt, Artificial Sequence
  Description of Artificial Sequence: Synthetic oligonucleotide
ugaauuuaugaauu

SEQ ID NO: 35138 - RNA, 14 nt, Artificial Sequence
  Description of Artificial Sequence: Synthetic oligonucleotide
uugaauuuaugaau

SEQ ID NO: 35139 - RNA, 14 nt, Artificial Sequence
  Description of Artificial Sequence: Synthetic oligonucleotide
uuugaauuuaugaa

SEQ ID NO: 35140 - RNA, 14 nt, Artificial Sequence
  Description of Artificial Sequence: Synthetic oligonucleotide
uuuugaauuuauga

SEQ ID NO: 35141 - RNA, 14 nt, Artificial Sequence
  Description of Artificial Sequence: Synthetic oligonucleotide
uuuuugaauuuaug

SEQ ID NO: 35142 - RNA, 14 nt, Artificial Sequence
  Description of Artificial Sequence: Synthetic oligonucleotide
uuuuuugaauuuau

SEQ ID NO: 35143 - RNA, 14 nt, Artificial Sequence
  Description of Artificial Sequence: Synthetic oligonucleotide
uuuuuuugaauuua

SEQ ID NO: 35144 - RNA, 14 nt, Artificial Sequence
  Description of Artificial Sequence: Synthetic oligonucleotide
uuuuuuuugaauuu

SEQ ID NO: 35145 - RNA, 14 nt, Artificial Sequence
  Description of Artificial Sequence: Synthetic oligonucleotide
auuuuuuuugaauu

SEQ ID NO: 35146 - RNA, 14 nt, Artificial Sequence
  Description of Artificial Sequence: Synthetic oligonucleotide
aauuuuuuuugaau

SEQ ID NO: 35147 - RNA, 14 nt, Artificial Sequence
  Description of Artificial Sequence: Synthetic oligonucleotide
gaauuuuuuuugaa

SEQ ID NO: 35148 - RNA, 14 nt, Artificial Sequence
  Description of Artificial Sequence: Synthetic oligonucleotide
agaauuuuuuuuga

SEQ ID NO: 35149 - RNA, 14 nt, Artificial Sequence
  Description of Artificial Sequence: Synthetic oligonucleotide
uagaauuuuuuuug

SEQ ID NO: 35150 - RNA, 14 nt, Artificial Sequence
  Description of Artificial Sequence: Synthetic oligonucleotide
auagaauuuuuuuu

SEQ ID NO: 35151 - RNA, 14 nt, Artificial Sequence
  Description of Artificial Sequence: Synthetic oligonucleotide
cauagaauuuuuuu

SEQ ID NO: 35152 - RNA, 14 nt, Artificial Sequence
  Description of Artificial Sequence: Synthetic oligonucleotide
ccauagaauuuuuu

SEQ ID NO: 35153 - RNA, 14 nt, Artificial Sequence
  Description of Artificial Sequence: Synthetic oligonucleotide
gccauagaauuuuu

SEQ ID NO: 35154 - RNA, 14 nt, Artificial Sequence
  Description of Artificial Sequence: Synthetic oligonucleotide
ugccauagaauuuu

SEQ ID NO: 35155 - RNA, 14 nt, Artificial Sequence
  Description of Artificial Sequence: Synthetic oligonucleotide
augccauagaauuu

SEQ ID NO: 35156 - RNA, 14 nt, Artificial Sequence
  Description of Artificial Sequence: Synthetic oligonucleotide
uaugccauagaauu

SEQ ID NO: 35157 - RNA, 14 nt, Artificial Sequence
  Description of Artificial Sequence: Synthetic oligonucleotide
cuaugccauagaau

SEQ ID NO: 35158 - RNA, 14 nt, Artificial Sequence
  Description of Artificial Sequence: Synthetic oligonucleotide
ccuaugccauagaa

SEQ ID NO: 35159 - RNA, 14 nt, Artificial Sequence
  Description of Artificial Sequence: Synthetic oligonucleotide
uccuaugccauaga

SEQ ID NO: 35160 - RNA, 14 nt, Artificial Sequence
  Description of Artificial Sequence: Synthetic oligonucleotide
uuccuaugccauag

SEQ ID NO: 35161 - RNA, 14 nt, Artificial Sequence
  Description of Artificial Sequence: Synthetic oligonucleotide
guuccuaugccaua

SEQ ID NO: 35162 - RNA, 14 nt, Artificial Sequence
  Description of Artificial Sequence: Synthetic oligonucleotide
gguuccuaugccau

SEQ ID NO: 35163 - RNA, 14 nt, Artificial Sequence
  Description of Artificial Sequence: Synthetic oligonucleotide
ugguuccuaugcca

SEQ ID NO: 35164 - RNA, 14 nt, Artificial Sequence
  Description of Artificial Sequence: Synthetic oligonucleotide
uugguuccuaugcc

SEQ ID NO: 35165 - RNA, 14 nt, Artificial Sequence
  Description of Artificial Sequence: Synthetic oligonucleotide
guugguuccuaugc

SEQ ID NO: 35166 - RNA, 14 nt, Artificial Sequence
  Description of Artificial Sequence: Synthetic oligonucleotide
aguugguuccuaug

SEQ ID NO: 35167 - RNA, 14 nt, Artificial Sequence
  Description of Artificial Sequence: Synthetic oligonucleotide
caguugguuccuau

SEQ ID NO: 35168 - RNA, 14 nt, Artificial Sequence
  Description of Artificial Sequence: Synthetic oligonucleotide
gcaguugguuccua

SEQ ID NO: 35169 - RNA, 14 nt, Artificial Sequence
  Description of Artificial Sequence: Synthetic oligonucleotide
ggcaguugguuccu

SEQ ID NO: 35170 - RNA, 14 nt, Artificial Sequence
  Description of Artificial Sequence: Synthetic oligonucleotide
aggcaguugguucc

SEQ ID NO: 35171 - RNA, 14 nt, Artificial Sequence
  Description of Artificial Sequence: Synthetic oligonucleotide
aaggcaguugguuc

SEQ ID NO: 35172 - RNA, 14 nt, Artificial Sequence
  Description of Artificial Sequence: Synthetic oligonucleotide
caaggcaguugguu

SEQ ID NO: 35173 - RNA, 14 nt, Artificial Sequence
  Description of Artificial Sequence: Synthetic oligonucleotide
gcaaggcaguuggu

SEQ ID NO: 35174 - RNA, 14 nt, Artificial Sequence
  Description of Artificial Sequence: Synthetic oligonucleotide
ggcaaggcaguugg

SEQ ID NO: 35175 - RNA, 14 nt, Artificial Sequence
  Description of Artificial Sequence: Synthetic oligonucleotide
aggcaaggcaguug

SEQ ID NO: 35176 - RNA, 14 nt, Artificial Sequence
  Description of Artificial Sequence: Synthetic oligonucleotide
aaggcaaggcaguu

SEQ ID NO: 35177 - RNA, 14 nt, Artificial Sequence
  Description of Artificial Sequence: Synthetic oligonucleotide
gaaggcaaggcagu

SEQ ID NO: 35178 - RNA, 14 nt, Artificial Sequence
  Description of Artificial Sequence: Synthetic oligonucleotide
ugaaggcaaggcag

SEQ ID NO: 35179 - RNA, 14 nt, Artificial Sequence
  Description of Artificial Sequence: Synthetic oligonucleotide
uugaaggcaaggca

SEQ ID NO: 35180 - RNA, 14 nt, Artificial Sequence
  Description of Artificial Sequence: Synthetic oligonucleotide
cuugaaggcaaggc

SEQ ID NO: 35181 - RNA, 14 nt, Artificial Sequence
  Description of Artificial Sequence: Synthetic oligonucleotide
ucuugaaggcaagg

SEQ ID NO: 35182 - RNA, 14 nt, Artificial Sequence
  Description of Artificial Sequence: Synthetic oligonucleotide
gucuugaaggcaag

SEQ ID NO: 35183 - RNA, 14 nt, Artificial Sequence
  Description of Artificial Sequence: Synthetic oligonucleotide
ggucuugaaggcaa

SEQ ID NO: 35184 - RNA, 14 nt, Artificial Sequence
  Description of Artificial Sequence: Synthetic oligonucleotide
aggucuugaaggca

SEQ ID NO: 35185 - RNA, 14 nt, Artificial Sequence
  Description of Artificial Sequence: Synthetic oligonucleotide
uaggucuugaaggc

SEQ ID NO: 35186 - RNA, 14 nt, Artificial Sequence
  Description of Artificial Sequence: Synthetic oligonucleotide
cuaggucuugaagg

SEQ ID NO: 35187 - RNA, 14 nt, Artificial Sequence
  Description of Artificial Sequence: Synthetic oligonucleotide
acuaggucuugaag

SEQ ID NO: 35188 - RNA, 14 nt, Artificial Sequence
  Description of Artificial Sequence: Synthetic oligonucleotide
uacuaggucuugaa

SEQ ID NO: 35189 - RNA, 14 nt, Artificial Sequence
  Description of Artificial Sequence: Synthetic oligonucleotide
uuacuaggucuuga

SEQ ID NO: 35190 - RNA, 14 nt, Artificial Sequence
  Description of Artificial Sequence: Synthetic oligonucleotide
guuacuaggucuug

SEQ ID NO: 35191 - RNA, 14 nt, Artificial Sequence
  Description of Artificial Sequence: Synthetic oligonucleotide
aguuacuaggucuu

SEQ ID NO: 35192 - RNA, 14 nt, Artificial Sequence
  Description of Artificial Sequence: Synthetic oligonucleotide
aaguuacuaggucu

SEQ ID NO: 35193 - RNA, 14 nt, Artificial Sequence
  Description of Artificial Sequence: Synthetic oligonucleotide
aaaguuacuagguc

SEQ ID NO: 35194 - RNA, 14 nt, Artificial Sequence
  Description of Artificial Sequence: Synthetic oligonucleotide
gaaaguuacuaggu

SEQ ID NO: 35195 - RNA, 14 nt, Artificial Sequence
  Description of Artificial Sequence: Synthetic oligonucleotide
agaaaguuacuagg

SEQ ID NO: 35196 - RNA, 14 nt, Artificial Sequence
  Description of Artificial Sequence: Synthetic oligonucleotide
gagaaaguuacuag

SEQ ID NO: 35197 - RNA, 14 nt, Artificial Sequence
  Description of Artificial Sequence: Synthetic oligonucleotide
agagaaaguuacua

SEQ ID NO: 35198 - RNA, 14 nt, Artificial Sequence
  Description of Artificial Sequence: Synthetic oligonucleotide
uagagaaaguuacu

SEQ ID NO: 35199 - RNA, 14 nt, Artificial Sequence
  Description of Artificial Sequence: Synthetic oligonucleotide
auagagaaaguuac

SEQ ID NO: 35200 - RNA, 14 nt, Artificial Sequence
  Description of Artificial Sequence: Synthetic oligonucleotide
uauagagaaaguua

SEQ ID NO: 35201 - RNA, 14 nt, Artificial Sequence
  Description of Artificial Sequence: Synthetic oligonucleotide
uuauagagaaaguu

SEQ ID NO: 35202 - RNA, 14 nt, Artificial Sequence
  Description of Artificial Sequence: Synthetic oligonucleotide
uuuauagagaaagu

SEQ ID NO: 35203 - RNA, 14 nt, Artificial Sequence
  Description of Artificial Sequence: Synthetic oligonucleotide
auuuauagagaaag

SEQ ID NO: 35204 - RNA, 14 nt, Artificial Sequence
  Description of Artificial Sequence: Synthetic oligonucleotide
gauuuauagagaaa

SEQ ID NO: 35205 - RNA, 14 nt, Artificial Sequence
  Description of Artificial Sequence: Synthetic oligonucleotide
agauuuauagagaa

SEQ ID NO: 35206 - RNA, 14 nt, Artificial Sequence
  Description of Artificial Sequence: Synthetic oligonucleotide
gagauuuauagaga

SEQ ID NO: 35207 - RNA, 14 nt, Artificial Sequence
  Description of Artificial Sequence: Synthetic oligonucleotide
cgagauuuauagag

SEQ ID NO: 35208 - RNA, 14 nt, Artificial Sequence
  Description of Artificial Sequence: Synthetic oligonucleotide
acgagauuuauaga

SEQ ID NO: 35209 - RNA, 14 nt, Artificial Sequence
  Description of Artificial Sequence: Synthetic oligonucleotide
cacgagauuuauag

SEQ ID NO: 35210 - RNA, 14 nt, Artificial Sequence
  Description of Artificial Sequence: Synthetic oligonucleotide
acacgagauuuaua

SEQ ID NO: 35211 - RNA, 14 nt, Artificial Sequence
  Description of Artificial Sequence: Synthetic oligonucleotide
aacacgagauuuau

SEQ ID NO: 35212 - RNA, 14 nt, Artificial Sequence
  Description of Artificial Sequence: Synthetic oligonucleotide
uaacacgagauuua

SEQ ID NO: 35213 - RNA, 14 nt, Artificial Sequence
  Description of Artificial Sequence: Synthetic oligonucleotide
uuaacacgagauuu

SEQ ID NO: 35214 - RNA, 14 nt, Artificial Sequence
  Description of Artificial Sequence: Synthetic oligonucleotide
guuaacacgagauu

SEQ ID NO: 35215 - RNA, 14 nt, Artificial Sequence
  Description of Artificial Sequence: Synthetic oligonucleotide
aguuaacacgagau

SEQ ID NO: 35216 - RNA, 14 nt, Artificial Sequence
  Description of Artificial Sequence: Synthetic oligonucleotide
caguuaacacgaga

SEQ ID NO: 35217 - RNA, 14 nt, Artificial Sequence
  Description of Artificial Sequence: Synthetic oligonucleotide
ucaguuaacacgag

SEQ ID NO: 35218 - RNA, 14 nt, Artificial Sequence
  Description of Artificial Sequence: Synthetic oligonucleotide
uucaguuaacacga

SEQ ID NO: 35219 - RNA, 14 nt, Artificial Sequence
  Description of Artificial Sequence: Synthetic oligonucleotide
uuucaguuaacacg

SEQ ID NO: 35220 - RNA, 14 nt, Artificial Sequence
  Description of Artificial Sequence: Synthetic oligonucleotide
auuucaguuaacac

SEQ ID NO: 35221 - RNA, 14 nt, Artificial Sequence
  Description of Artificial Sequence: Synthetic oligonucleotide
aauuucaguuaaca

SEQ ID NO: 35222 - RNA, 14 nt, Artificial Sequence
  Description of Artificial Sequence: Synthetic oligonucleotide
aaauuucaguuaac

SEQ ID NO: 35223 - RNA, 14 nt, Artificial Sequence
  Description of Artificial Sequence: Synthetic oligonucleotide
aaaauuucaguuaa

SEQ ID NO: 35224 - RNA, 14 nt, Artificial Sequence
  Description of Artificial Sequence: Synthetic oligonucleotide
aaaaauuucaguua

SEQ ID NO: 35225 - RNA, 14 nt, Artificial Sequence
  Description of Artificial Sequence: Synthetic oligonucleotide
aaaaaauuucaguu

SEQ ID NO: 35226 - RNA, 14 nt, Artificial Sequence
  Description of Artificial Sequence: Synthetic oligonucleotide
aaaaaaauuucagu

SEQ ID NO: 35227 - RNA, 14 nt, Artificial Sequence
  Description of Artificial Sequence: Synthetic oligonucleotide
aaaaaaaauuucag

SEQ ID NO: 35228 - RNA, 14 nt, Artificial Sequence
  Description of Artificial Sequence: Synthetic oligonucleotide
uaaaaaaaauuuca

SEQ ID NO: 35229 - RNA, 14 nt, Artificial Sequence
  Description of Artificial Sequence: Synthetic oligonucleotide
uuaaaaaaaauuuc

SEQ ID NO: 35230 - RNA, 14 nt, Artificial Sequence
  Description of Artificial Sequence: Synthetic oligonucleotide
uuuaaaaaaaauuu

SEQ ID NO: 35231 - RNA, 14 nt, Artificial Sequence
  Description of Artificial Sequence: Synthetic oligonucleotide
auuuaaaaaaaauu

SEQ ID NO: 35232 - RNA, 14 nt, Artificial Sequence
  Description of Artificial Sequence: Synthetic oligonucleotide
uauuuaaaaaaaau

SEQ ID NO: 35233 - RNA, 14 nt, Artificial Sequence
  Description of Artificial Sequence: Synthetic oligonucleotide
auauuuaaaaaaaa

SEQ ID NO: 35234 - RNA, 14 nt, Artificial Sequence
  Description of Artificial Sequence: Synthetic oligonucleotide
uauauuuaaaaaaa

SEQ ID NO: 35235 - RNA, 14 nt, Artificial Sequence
  Description of Artificial Sequence: Synthetic oligonucleotide
auauauuuaaaaaa

SEQ ID NO: 35236 - RNA, 14 nt, Artificial Sequence
  Description of Artificial Sequence: Synthetic oligonucleotide
aauauauuuaaaaa

SEQ ID NO: 35237 - RNA, 14 nt, Artificial Sequence
  Description of Artificial Sequence: Synthetic oligonucleotide
aaauauauuuaaaa

SEQ ID NO: 35238 - RNA, 14 nt, Artificial Sequence
  Description of Artificial Sequence: Synthetic oligonucleotide
aaaauauauuuaaa

SEQ ID NO: 35239 - RNA, 14 nt, Artificial Sequence
  Description of Artificial Sequence: Synthetic oligonucleotide
aaaaauauauuuaa

SEQ ID NO: 35240 - RNA, 14 nt, Artificial Sequence
  Description of Artificial Sequence: Synthetic oligonucleotide
aaaaaauauauuua

SEQ ID NO: 35241 - RNA, 14 nt, Artificial Sequence
  Description of Artificial Sequence: Synthetic oligonucleotide
uaaaaaauauauuu

SEQ ID NO: 35242 - RNA, 14 nt, Artificial Sequence
  Description of Artificial Sequence: Synthetic oligonucleotide
cuaaaaaauauauu

SEQ ID NO: 35243 - RNA, 14 nt, Artificial Sequence
  Description of Artificial Sequence: Synthetic oligonucleotide
ucuaaaaaauauau

SEQ ID NO: 35244 - RNA, 14 nt, Artificial Sequence
  Description of Artificial Sequence: Synthetic oligonucleotide
aucuaaaaaauaua

SEQ ID NO: 35245 - RNA, 14 nt, Artificial Sequence
  Description of Artificial Sequence: Synthetic oligonucleotide
aaucuaaaaaauau

SEQ ID NO: 35246 - RNA, 14 nt, Artificial Sequence
  Description of Artificial Sequence: Synthetic oligonucleotide
caaucuaaaaaaua

SEQ ID NO: 35247 - RNA, 14 nt, Artificial Sequence
  Description of Artificial Sequence: Synthetic oligonucleotide
ccaaucuaaaaaau

SEQ ID NO: 35248 - RNA, 14 nt, Artificial Sequence
  Description of Artificial Sequence: Synthetic oligonucleotide
accaaucuaaaaaa

SEQ ID NO: 35249 - RNA, 14 nt, Artificial Sequence
  Description of Artificial Sequence: Synthetic oligonucleotide
uaccaaucuaaaaa

SEQ ID NO: 35250 - RNA, 14 nt, Artificial Sequence
  Description of Artificial Sequence: Synthetic oligonucleotide
uuaccaaucuaaaa

SEQ ID NO: 35251 - RNA, 14 nt, Artificial Sequence
  Description of Artificial Sequence: Synthetic oligonucleotide
auuaccaaucuaaa

SEQ ID NO: 35252 - RNA, 14 nt, Artificial Sequence
  Description of Artificial Sequence: Synthetic oligonucleotide
uauuaccaaucuaa

SEQ ID NO: 35253 - RNA, 14 nt, Artificial Sequence
  Description of Artificial Sequence: Synthetic oligonucleotide
auauuaccaaucua

SEQ ID NO: 35254 - RNA, 14 nt, Artificial Sequence
  Description of Artificial Sequence: Synthetic oligonucleotide
aauauuaccaaucu

SEQ ID NO: 35255 - RNA, 14 nt, Artificial Sequence
  Description of Artificial Sequence: Synthetic oligonucleotide
aaauauuaccaauc

SEQ ID NO: 35256 - RNA, 14 nt, Artificial Sequence
  Description of Artificial Sequence: Synthetic oligonucleotide
uaaauauuaccaau

SEQ ID NO: 35257 - RNA, 14 nt, Artificial Sequence
  Description of Artificial Sequence: Synthetic oligonucleotide
uuaaauauuaccaa

SEQ ID NO: 35258 - RNA, 14 nt, Artificial Sequence
  Description of Artificial Sequence: Synthetic oligonucleotide
uuuaaauauuacca

SEQ ID NO: 35259 - RNA, 14 nt, Artificial Sequence
  Description of Artificial Sequence: Synthetic oligonucleotide
guuuaaauauuacc

SEQ ID NO: 35260 - RNA, 14 nt, Artificial Sequence
  Description of Artificial Sequence: Synthetic oligonucleotide
gguuuaaauauuac

SEQ ID NO: 35261 - RNA, 14 nt, Artificial Sequence
  Description of Artificial Sequence: Synthetic oligonucleotide
ugguuuaaauauua

SEQ ID NO: 35262 - RNA, 14 nt, Artificial Sequence
  Description of Artificial Sequence: Synthetic oligonucleotide
cugguuuaaauauu

SEQ ID NO: 35263 - RNA, 14 nt, Artificial Sequence
  Description of Artificial Sequence: Synthetic oligonucleotide
gcugguuuaaauau

SEQ ID NO: 35264 - RNA, 14 nt, Artificial Sequence
  Description of Artificial Sequence: Synthetic oligonucleotide
ugcugguuuaaaua

SEQ ID NO: 35265 - RNA, 14 nt, Artificial Sequence
  Description of Artificial Sequence: Synthetic oligonucleotide
uugcugguuuaaau

SEQ ID NO: 35266 - RNA, 14 nt, Artificial Sequence
  Description of Artificial Sequence: Synthetic oligonucleotide
uuugcugguuuaaa

SEQ ID NO: 35267 - RNA, 14 nt, Artificial Sequence
  Description of Artificial Sequence: Synthetic oligonucleotide
auuugcugguuuaa

SEQ ID NO: 35268 - RNA, 14 nt, Artificial Sequence
  Description of Artificial Sequence: Synthetic oligonucleotide
uauuugcugguuua

SEQ ID NO: 35269 - RNA, 14 nt, Artificial Sequence
  Description of Artificial Sequence: Synthetic oligonucleotide
guauuugcugguuu

SEQ ID NO: 35270 - RNA, 14 nt, Artificial Sequence
  Description of Artificial Sequence: Synthetic oligonucleotide
aguauuugcugguu

SEQ ID NO: 35271 - RNA, 14 nt, Artificial Sequence
  Description of Artificial Sequence: Synthetic oligonucleotide
aaguauuugcuggu

SEQ ID NO: 35272 - RNA, 14 nt, Artificial Sequence
  Description of Artificial Sequence: Synthetic oligonucleotide
uaaguauuugcugg

SEQ ID NO: 35273 - RNA, 14 nt, Artificial Sequence
  Description of Artificial Sequence: Synthetic oligonucleotide
uuaaguauuugcug

SEQ ID NO: 35274 - RNA, 14 nt, Artificial Sequence
  Description of Artificial Sequence: Synthetic oligonucleotide
uuuaaguauuugcu

SEQ ID NO: 35275 - RNA, 14 nt, Artificial Sequence
  Description of Artificial Sequence: Synthetic oligonucleotide
cuuuaaguauuugc

SEQ ID NO: 35276 - RNA, 14 nt, Artificial Sequence
  Description of Artificial Sequence: Synthetic oligonucleotide
gcuuuaaguauuug

SEQ ID NO: 35277 - RNA, 14 nt, Artificial Sequence
  Description of Artificial Sequence: Synthetic oligonucleotide
agcuuuaaguauuu

SEQ ID NO: 35278 - RNA, 14 nt, Artificial Sequence
  Description of Artificial Sequence: Synthetic oligonucleotide
aagcuuuaaguauu

SEQ ID NO: 35279 - RNA, 14 nt, Artificial Sequence
  Description of Artificial Sequence: Synthetic oligonucleotide
aaagcuuuaaguau

SEQ ID NO: 35280 - RNA, 14 nt, Artificial Sequence
  Description of Artificial Sequence: Synthetic oligonucleotide
uaaagcuuuaagua

SEQ ID NO: 35281 - RNA, 14 nt, Artificial Sequence
  Description of Artificial Sequence: Synthetic oligonucleotide
auaaagcuuuaagu

SEQ ID NO: 35282 - RNA, 14 nt, Artificial Sequence
  Description of Artificial Sequence: Synthetic oligonucleotide
aauaaagcuuuaag

SEQ ID NO: 35283 - RNA, 14 nt, Artificial Sequence
  Description of Artificial Sequence: Synthetic oligonucleotide
uaauaaagcuuuaa

SEQ ID NO: 35284 - RNA, 14 nt, Artificial Sequence
  Description of Artificial Sequence: Synthetic oligonucleotide
uuaauaaagcuuua

SEQ ID NO: 35285 - RNA, 14 nt, Artificial Sequence
  Description of Artificial Sequence: Synthetic oligonucleotide
uuuaauaaagcuuu

SEQ ID NO: 35286 - RNA, 14 nt, Artificial Sequence
  Description of Artificial Sequence: Synthetic oligonucleotide
guuuaauaaagcuu

SEQ ID NO: 35287 - RNA, 14 nt, Artificial Sequence
  Description of Artificial Sequence: Synthetic oligonucleotide
uguuuaauaaagcu

SEQ ID NO: 35288 - RNA, 14 nt, Artificial Sequence
  Description of Artificial Sequence: Synthetic oligonucleotide
auguuuaauaaagc

SEQ ID NO: 35289 - RNA, 14 nt, Artificial Sequence
  Description of Artificial Sequence: Synthetic oligonucleotide
aauguuuaauaaag

SEQ ID NO: 35290 - RNA, 14 nt, Artificial Sequence
  Description of Artificial Sequence: Synthetic oligonucleotide
aaauguuuaauaaa

SEQ ID NO: 35291 - RNA, 14 nt, Artificial Sequence
  Description of Artificial Sequence: Synthetic oligonucleotide
aaaauguuuaauaa

SEQ ID NO: 35292 - RNA, 14 nt, Artificial Sequence
  Description of Artificial Sequence: Synthetic oligonucleotide
uaaaauguuuaaua

SEQ ID NO: 35293 - RNA, 14 nt, Artificial Sequence
  Description of Artificial Sequence: Synthetic oligonucleotide
uuaaaauguuuaau

SEQ ID NO: 35294 - RNA, 14 nt, Artificial Sequence
  Description of Artificial Sequence: Synthetic oligonucleotide
auuaaaauguuuaa

SEQ ID NO: 35295 - RNA, 14 nt, Artificial Sequence
  Description of Artificial Sequence: Synthetic oligonucleotide
gauuaaaauguuua

SEQ ID NO: 35296 - RNA, 14 nt, Artificial Sequence
  Description of Artificial Sequence: Synthetic oligonucleotide
ugauuaaaauguuu

SEQ ID NO: 35297 - RNA, 14 nt, Artificial Sequence
  Description of Artificial Sequence: Synthetic oligonucleotide
cugauuaaaauguu

SEQ ID NO: 35298 - RNA, 14 nt, Artificial Sequence
  Description of Artificial Sequence: Synthetic oligonucleotide
ucugauuaaaaugu

SEQ ID NO: 35299 - RNA, 14 nt, Artificial Sequence
  Description of Artificial Sequence: Synthetic oligonucleotide
aucugauuaaaaug

SEQ ID NO: 35300 - RNA, 14 nt, Artificial Sequence
  Description of Artificial Sequence: Synthetic oligonucleotide
uaucugauuaaaau

SEQ ID NO: 35301 - RNA, 14 nt, Artificial Sequence
  Description of Artificial Sequence: Synthetic oligonucleotide
uuaucugauuaaaa

SEQ ID NO: 35302 - RNA, 14 nt, Artificial Sequence
  Description of Artificial Sequence: Synthetic oligonucleotide
cuuaucugauuaaa

SEQ ID NO: 35303 - RNA, 14 nt, Artificial Sequence
  Description of Artificial Sequence: Synthetic oligonucleotide
acuuaucugauuaa

SEQ ID NO: 35304 - RNA, 14 nt, Artificial Sequence
  Description of Artificial Sequence: Synthetic oligonucleotide
cacuuaucugauua

SEQ ID NO: 35305 - RNA, 14 nt, Artificial Sequence
  Description of Artificial Sequence: Synthetic oligonucleotide
ucacuuaucugauu

SEQ ID NO: 35306 - RNA, 14 nt, Artificial Sequence
  Description of Artificial Sequence: Synthetic oligonucleotide
cucacuuaucugau

SEQ ID NO: 35307 - RNA, 14 nt, Artificial Sequence
  Description of Artificial Sequence: Synthetic oligonucleotide
acucacuuaucuga

SEQ ID NO: 35308 - RNA, 14 nt, Artificial Sequence
  Description of Artificial Sequence: Synthetic oligonucleotide
uacucacuuaucug

SEQ ID NO: 35309 - RNA, 14 nt, Artificial Sequence
  Description of Artificial Sequence: Synthetic oligonucleotide
uuacucacuuaucu

SEQ ID NO: 35310 - RNA, 14 nt, Artificial Sequence
  Description of Artificial Sequence: Synthetic oligonucleotide
uuuacucacuuauc

SEQ ID NO: 35311 - RNA, 14 nt, Artificial Sequence
  Description of Artificial Sequence: Synthetic oligonucleotide
cuuuacucacuuau

SEQ ID NO: 35312 - RNA, 14 nt, Artificial Sequence
  Description of Artificial Sequence: Synthetic oligonucleotide
gcuuuacucacuua

SEQ ID NO: 35313 - RNA, 14 nt, Artificial Sequence
  Description of Artificial Sequence: Synthetic oligonucleotide
agcuuuacucacuu

SEQ ID NO: 35314 - RNA, 14 nt, Artificial Sequence
  Description of Artificial Sequence: Synthetic oligonucleotide
aagcuuuacucacu

SEQ ID NO: 35315 - RNA, 14 nt, Artificial Sequence
  Description of Artificial Sequence: Synthetic oligonucleotide
aaagcuuuacucac

SEQ ID NO: 35316 - RNA, 14 nt, Artificial Sequence
  Description of Artificial Sequence: Synthetic oligonucleotide
aaaagcuuuacuca

SEQ ID NO: 35317 - RNA, 14 nt, Artificial Sequence
  Description of Artificial Sequence: Synthetic oligonucleotide
uaaaagcuuuacuc

SEQ ID NO: 35318 - RNA, 14 nt, Artificial Sequence
  Description of Artificial Sequence: Synthetic oligonucleotide
auaaaagcuuuacu

SEQ ID NO: 35319 - RNA, 14 nt, Artificial Sequence
  Description of Artificial Sequence: Synthetic oligonucleotide
aauaaaagcuuuac

SEQ ID NO: 35320 - RNA, 14 nt, Artificial Sequence
  Description of Artificial Sequence: Synthetic oligonucleotide
aaauaaaagcuuua

SEQ ID NO: 35321 - RNA, 14 nt, Artificial Sequence
  Description of Artificial Sequence: Synthetic oligonucleotide
caaauaaaagcuuu

SEQ ID NO: 35322 - RNA, 14 nt, Artificial Sequence
  Description of Artificial Sequence: Synthetic oligonucleotide
gcaaauaaaagcuu

SEQ ID NO: 35323 - RNA, 14 nt, Artificial Sequence
  Description of Artificial Sequence: Synthetic oligonucleotide
ggcaaauaaaagcu

SEQ ID NO: 35324 - RNA, 14 nt, Artificial Sequence
  Description of Artificial Sequence: Synthetic oligonucleotide
uggcaaauaaaagc

SEQ ID NO: 35325 - RNA, 14 nt, Artificial Sequence
  Description of Artificial Sequence: Synthetic oligonucleotide
auggcaaauaaaag

SEQ ID NO: 35326 - RNA, 14 nt, Artificial Sequence
  Description of Artificial Sequence: Synthetic oligonucleotide
aauggcaaauaaaa

SEQ ID NO: 35327 - RNA, 14 nt, Artificial Sequence
  Description of Artificial Sequence: Synthetic oligonucleotide
aaauggcaaauaaa

SEQ ID NO: 35328 - RNA, 14 nt, Artificial Sequence
  Description of Artificial Sequence: Synthetic oligonucleotide
caaauggcaaauaa

SEQ ID NO: 35329 - RNA, 14 nt, Artificial Sequence
  Description of Artificial Sequence: Synthetic oligonucleotide
ccaaauggcaaaua

SEQ ID NO: 35330 - RNA, 14 nt, Artificial Sequence
  Description of Artificial Sequence: Synthetic oligonucleotide
uccaaauggcaaau

SEQ ID NO: 35331 - RNA, 14 nt, Artificial Sequence
  Description of Artificial Sequence: Synthetic oligonucleotide
auccaaauggcaaa

SEQ ID NO: 35332 - RNA, 14 nt, Artificial Sequence
  Description of Artificial Sequence: Synthetic oligonucleotide
cauccaaauggcaa

SEQ ID NO: 35333 - RNA, 14 nt, Artificial Sequence
  Description of Artificial Sequence: Synthetic oligonucleotide
gcauccaaauggca

SEQ ID NO: 35334 - RNA, 14 nt, Artificial Sequence
  Description of Artificial Sequence: Synthetic oligonucleotide
ggcauccaaauggc

SEQ ID NO: 35335 - RNA, 14 nt, Artificial Sequence
  Description of Artificial Sequence: Synthetic oligonucleotide
aggcauccaaaugg

SEQ ID NO: 35336 - RNA, 14 nt, Artificial Sequence
  Description of Artificial Sequence: Synthetic oligonucleotide
aaggcauccaaaug

SEQ ID NO: 35337 - RNA, 14 nt, Artificial Sequence
  Description of Artificial Sequence: Synthetic oligonucleotide
gaaggcauccaaau

SEQ ID NO: 35338 - RNA, 14 nt, Artificial Sequence
  Description of Artificial Sequence: Synthetic oligonucleotide
cgaaggcauccaaa

SEQ ID NO: 35339 - RNA, 14 nt, Artificial Sequence
  Description of Artificial Sequence: Synthetic oligonucleotide
acgaaggcauccaa

SEQ ID NO: 35340 - RNA, 14 nt, Artificial Sequence
  Description of Artificial Sequence: Synthetic oligonucleotide
aacgaaggcaucca

SEQ ID NO: 35341 - RNA, 14 nt, Artificial Sequence
  Description of Artificial Sequence: Synthetic oligonucleotide
gaacgaaggcaucc

SEQ ID NO: 35342 - RNA, 14 nt, Artificial Sequence
  Description of Artificial Sequence: Synthetic oligonucleotide
ugaacgaaggcauc

SEQ ID NO: 35343 - RNA, 14 nt, Artificial Sequence
  Description of Artificial Sequence: Synthetic oligonucleotide
uugaacgaaggcau

SEQ ID NO: 35344 - RNA, 14 nt, Artificial Sequence
  Description of Artificial Sequence: Synthetic oligonucleotide
uuugaacgaaggca

SEQ ID NO: 35345 - RNA, 14 nt, Artificial Sequence
  Description of Artificial Sequence: Synthetic oligonucleotide
cuuugaacgaaggc

SEQ ID NO: 35346 - RNA, 14 nt, Artificial Sequence
  Description of Artificial Sequence: Synthetic oligonucleotide
acuuugaacgaagg

SEQ ID NO: 35347 - RNA, 14 nt, Artificial Sequence
  Description of Artificial Sequence: Synthetic oligonucleotide
cacuuugaacgaag

SEQ ID NO: 35348 - RNA, 14 nt, Artificial Sequence
  Description of Artificial Sequence: Synthetic oligonucleotide
ucacuuugaacgaa

SEQ ID NO: 35349 - RNA, 14 nt, Artificial Sequence
  Description of Artificial Sequence: Synthetic oligonucleotide
aucacuuugaacga

SEQ ID NO: 35350 - RNA, 14 nt, Artificial Sequence
  Description of Artificial Sequence: Synthetic oligonucleotide
uaucacuuugaacg

SEQ ID NO: 35351 - RNA, 14 nt, Artificial Sequence
  Description of Artificial Sequence: Synthetic oligonucleotide
cuaucacuuugaac

SEQ ID NO: 35352 - RNA, 14 nt, Artificial Sequence
  Description of Artificial Sequence: Synthetic oligonucleotide
ucuaucacuuugaa

SEQ ID NO: 35353 - RNA, 14 nt, Artificial Sequence
  Description of Artificial Sequence: Synthetic oligonucleotide
cucuaucacuuuga

SEQ ID NO: 35354 - RNA, 14 nt, Artificial Sequence
  Description of Artificial Sequence: Synthetic oligonucleotide
acucuaucacuuug

SEQ ID NO: 35355 - RNA, 14 nt, Artificial Sequence
  Description of Artificial Sequence: Synthetic oligonucleotide
cacucuaucacuuu

SEQ ID NO: 35356 - RNA, 14 nt, Artificial Sequence
  Description of Artificial Sequence: Synthetic oligonucleotide
acacucuaucacuu

SEQ ID NO: 35357 - RNA, 14 nt, Artificial Sequence
  Description of Artificial Sequence: Synthetic oligonucleotide
aacacucuaucacu

SEQ ID NO: 35358 - RNA, 14 nt, Artificial Sequence
  Description of Artificial Sequence: Synthetic oligonucleotide
aaacacucuaucac

SEQ ID NO: 35359 - RNA, 14 nt, Artificial Sequence
  Description of Artificial Sequence: Synthetic oligonucleotide
aaaacacucuauca

SEQ ID NO: 35360 - RNA, 14 nt, Artificial Sequence
  Description of Artificial Sequence: Synthetic oligonucleotide
caaaacacucuauc

SEQ ID NO: 35361 - RNA, 14 nt, Artificial Sequence
  Description of Artificial Sequence: Synthetic oligonucleotide
gcaaaacacucuau

SEQ ID NO: 35362 - RNA, 14 nt, Artificial Sequence
  Description of Artificial Sequence: Synthetic oligonucleotide
agcaaaacacucua

SEQ ID NO: 35363 - RNA, 14 nt, Artificial Sequence
  Description of Artificial Sequence: Synthetic oligonucleotide
cagcaaaacacucu

SEQ ID NO: 35364 - RNA, 14 nt, Artificial Sequence
  Description of Artificial Sequence: Synthetic oligonucleotide
ucagcaaaacacuc

SEQ ID NO: 35365 - RNA, 14 nt, Artificial Sequence
  Description of Artificial Sequence: Synthetic oligonucleotide
aucagcaaaacacu

SEQ ID NO: 35366 - RNA, 14 nt, Artificial Sequence
  Description of Artificial Sequence: Synthetic oligonucleotide
uaucagcaaaacac

SEQ ID NO: 35367 - RNA, 14 nt, Artificial Sequence
  Description of Artificial Sequence: Synthetic oligonucleotide
cuaucagcaaaaca

SEQ ID NO: 35368 - RNA, 14 nt, Artificial Sequence
  Description of Artificial Sequence: Synthetic oligonucleotide
acuaucagcaaaac

SEQ ID NO: 35369 - RNA, 14 nt, Artificial Sequence
  Description of Artificial Sequence: Synthetic oligonucleotide
cacuaucagcaaaa

SEQ ID NO: 35370 - RNA, 14 nt, Artificial Sequence
  Description of Artificial Sequence: Synthetic oligonucleotide
gcacuaucagcaaa

SEQ ID NO: 35371 - RNA, 14 nt, Artificial Sequence
  Description of Artificial Sequence: Synthetic oligonucleotide
agcacuaucagcaa

SEQ ID NO: 35372 - RNA, 14 nt, Artificial Sequence
  Description of Artificial Sequence: Synthetic oligonucleotide
cagcacuaucagca

SEQ ID NO: 35373 - RNA, 14 nt, Artificial Sequence
  Description of Artificial Sequence: Synthetic oligonucleotide
acagcacuaucagc

SEQ ID NO: 35374 - RNA, 14 nt, Artificial Sequence
  Description of Artificial Sequence: Synthetic oligonucleotide
uacagcacuaucag

SEQ ID NO: 35375 - RNA, 14 nt, Artificial Sequence
  Description of Artificial Sequence: Synthetic oligonucleotide
cuacagcacuauca

SEQ ID NO: 35376 - RNA, 14 nt, Artificial Sequence
  Description of Artificial Sequence: Synthetic oligonucleotide
gcuacagcacuauc

SEQ ID NO: 35377 - RNA, 14 nt, Artificial Sequence
  Description of Artificial Sequence: Synthetic oligonucleotide
ugcuacagcacuau

SEQ ID NO: 35378 - RNA, 14 nt, Artificial Sequence
  Description of Artificial Sequence: Synthetic oligonucleotide
cugcuacagcacua

SEQ ID NO: 35379 - RNA, 14 nt, Artificial Sequence
  Description of Artificial Sequence: Synthetic oligonucleotide
gcugcuacagcacu

SEQ ID NO: 35380 - RNA, 14 nt, Artificial Sequence
  Description of Artificial Sequence: Synthetic oligonucleotide
ugcugcuacagcac

SEQ ID NO: 35381 - RNA, 14 nt, Artificial Sequence
  Description of Artificial Sequence: Synthetic oligonucleotide
cugcugcuacagca

SEQ ID NO: 35382 - RNA, 14 nt, Artificial Sequence
  Description of Artificial Sequence: Synthetic oligonucleotide
acugcugcuacagc

SEQ ID NO: 35383 - RNA, 14 nt, Artificial Sequence
  Description of Artificial Sequence: Synthetic oligonucleotide
aacugcugcuacag

SEQ ID NO: 35384 - RNA, 14 nt, Artificial Sequence
  Description of Artificial Sequence: Synthetic oligonucleotide
caacugcugcuaca

SEQ ID NO: 35385 - RNA, 14 nt, Artificial Sequence
  Description of Artificial Sequence: Synthetic oligonucleotide
acaacugcugcuac

SEQ ID NO: 35386 - RNA, 14 nt, Artificial Sequence
  Description of Artificial Sequence: Synthetic oligonucleotide
uacaacugcugcua

SEQ ID NO: 35387 - RNA, 14 nt, Artificial Sequence
  Description of Artificial Sequence: Synthetic oligonucleotide
uuacaacugcugcu

SEQ ID NO: 35388 - RNA, 14 nt, Artificial Sequence
  Description of Artificial Sequence: Synthetic oligonucleotide
uuuacaacugcugc

SEQ ID NO: 35389 - RNA, 14 nt, Artificial Sequence
  Description of Artificial Sequence: Synthetic oligonucleotide
cuuuacaacugcug

SEQ ID NO: 35390 - RNA, 14 nt, Artificial Sequence
  Description of Artificial Sequence: Synthetic oligonucleotide
acuuuacaacugcu

SEQ ID NO: 35391 - RNA, 14 nt, Artificial Sequence
  Description of Artificial Sequence: Synthetic oligonucleotide
uacuuuacaacugc

SEQ ID NO: 35392 - RNA, 14 nt, Artificial Sequence
  Description of Artificial Sequence: Synthetic oligonucleotide
cuacuuuacaacug

SEQ ID NO: 35393 - RNA, 14 nt, Artificial Sequence
  Description of Artificial Sequence: Synthetic oligonucleotide
gcuacuuuacaacu

SEQ ID NO: 35394 - RNA, 14 nt, Artificial Sequence
  Description of Artificial Sequence: Synthetic oligonucleotide
ggcuacuuuacaac

SEQ ID NO: 35395 - RNA, 14 nt, Artificial Sequence
  Description of Artificial Sequence: Synthetic oligonucleotide
uggcuacuuuacaa

SEQ ID NO: 35396 - RNA, 14 nt, Artificial Sequence
  Description of Artificial Sequence: Synthetic oligonucleotide
uuggcuacuuuaca

SEQ ID NO: 35397 - RNA, 14 nt, Artificial Sequence
  Description of Artificial Sequence: Synthetic oligonucleotide
uuuggcuacuuuac

SEQ ID NO: 35398 - RNA, 14 nt, Artificial Sequence
  Description of Artificial Sequence: Synthetic oligonucleotide
uuuuggcuacuuua

SEQ ID NO: 35399 - RNA, 14 nt, Artificial Sequence
  Description of Artificial Sequence: Synthetic oligonucleotide
cuuuuggcuacuuu

SEQ ID NO: 35400 - RNA, 14 nt, Artificial Sequence
  Description of Artificial Sequence: Synthetic oligonucleotide
gcuuuuggcuacuu

SEQ ID NO: 35401 - RNA, 14 nt, Artificial Sequence
  Description of Artificial Sequence: Synthetic oligonucleotide
ggcuuuuggcuacu

SEQ ID NO: 35402 - RNA, 14 nt, Artificial Sequence
  Description of Artificial Sequence: Synthetic oligonucleotide
uggcuuuuggcuac

SEQ ID NO: 35403 - RNA, 14 nt, Artificial Sequence
  Description of Artificial Sequence: Synthetic oligonucleotide
guggcuuuuggcua

SEQ ID NO: 35404 - RNA, 14 nt, Artificial Sequence
  Description of Artificial Sequence: Synthetic oligonucleotide
cguggcuuuuggcu

SEQ ID NO: 35405 - RNA, 14 nt, Artificial Sequence
  Description of Artificial Sequence: Synthetic oligonucleotide
acguggcuuuuggc

SEQ ID NO: 35406 - RNA, 14 nt, Artificial Sequence
  Description of Artificial Sequence: Synthetic oligonucleotide
aacguggcuuuugg

SEQ ID NO: 35407 - RNA, 14 nt, Artificial Sequence
  Description of Artificial Sequence: Synthetic oligonucleotide
caacguggcuuuug

SEQ ID NO: 35408 - RNA, 14 nt, Artificial Sequence
  Description of Artificial Sequence: Synthetic oligonucleotide
acaacguggcuuuu

SEQ ID NO: 35409 - RNA, 14 nt, Artificial Sequence
  Description of Artificial Sequence: Synthetic oligonucleotide
aacaacguggcuuu

SEQ ID NO: 35410 - RNA, 14 nt, Artificial Sequence
  Description of Artificial Sequence: Synthetic oligonucleotide
aaacaacguggcuu

SEQ ID NO: 35411 - RNA, 14 nt, Artificial Sequence
  Description of Artificial Sequence: Synthetic oligonucleotide
uaaacaacguggcu

SEQ ID NO: 35412 - RNA, 14 nt, Artificial Sequence
  Description of Artificial Sequence: Synthetic oligonucleotide
auaaacaacguggc

SEQ ID NO: 35413 - RNA, 14 nt, Artificial Sequence
  Description of Artificial Sequence: Synthetic oligonucleotide
aauaaacaacgugg

SEQ ID NO: 35414 - RNA, 14 nt, Artificial Sequence
  Description of Artificial Sequence: Synthetic oligonucleotide
aaauaaacaacgug

SEQ ID NO: 35415 - RNA, 14 nt, Artificial Sequence
  Description of Artificial Sequence: Synthetic oligonucleotide
uaaauaaacaacgu

SEQ ID NO: 35416 - RNA, 14 nt, Artificial Sequence
  Description of Artificial Sequence: Synthetic oligonucleotide
guaaauaaacaacg

SEQ ID NO: 35417 - RNA, 14 nt, Artificial Sequence
  Description of Artificial Sequence: Synthetic oligonucleotide
aguaaauaaacaac

SEQ ID NO: 35418 - RNA, 14 nt, Artificial Sequence
  Description of Artificial Sequence: Synthetic oligonucleotide
caguaaauaaacaa

SEQ ID NO: 35419 - RNA, 14 nt, Artificial Sequence
  Description of Artificial Sequence: Synthetic oligonucleotide
ccaguaaauaaaca

SEQ ID NO: 35420 - RNA, 14 nt, Artificial Sequence
  Description of Artificial Sequence: Synthetic oligonucleotide
accaguaaauaaac

SEQ ID NO: 35421 - RNA, 14 nt, Artificial Sequence
  Description of Artificial Sequence: Synthetic oligonucleotide
aaccaguaaauaaa

SEQ ID NO: 35422 - RNA, 14 nt, Artificial Sequence
  Description of Artificial Sequence: Synthetic oligonucleotide
aaaccaguaaauaa

SEQ ID NO: 35423 - RNA, 14 nt, Artificial Sequence
  Description of Artificial Sequence: Synthetic oligonucleotide
caaaccaguaaaua

SEQ ID NO: 35424 - RNA, 14 nt, Artificial Sequence
  Description of Artificial Sequence: Synthetic oligonucleotide
acaaaccaguaaau

SEQ ID NO: 35425 - RNA, 14 nt, Artificial Sequence
  Description of Artificial Sequence: Synthetic oligonucleotide
cacaaaccaguaaa

SEQ ID NO: 35426 - RNA, 14 nt, Artificial Sequence
  Description of Artificial Sequence: Synthetic oligonucleotide
ccacaaaccaguaa

SEQ ID NO: 35427 - RNA, 14 nt, Artificial Sequence
  Description of Artificial Sequence: Synthetic oligonucleotide
gccacaaaccagua

SEQ ID NO: 35428 - RNA, 14 nt, Artificial Sequence
  Description of Artificial Sequence: Synthetic oligonucleotide
ggccacaaaccagu

SEQ ID NO: 35429 - DNA, 14 bp, Artificial Sequence
  Description of Artificial Sequence: Synthetic oligonucleotide
aggccacaaaccag

SEQ ID NO: 35430 - DNA, 14 bp, Artificial Sequence
  Description of Artificial Sequence: Synthetic oligonucleotide
aaggccacaaacca

SEQ ID NO: 35431 - DNA, 14 bp, Artificial Sequence
  Description of Artificial Sequence: Synthetic oligonucleotide
aaaggccacaaacc

SEQ ID NO: 35432 - DNA, 14 bp, Artificial Sequence
  Description of Artificial Sequence: Synthetic oligonucleotide
aaaaggccacaaac

SEQ ID NO: 35433 - RNA, 14 nt, Artificial Sequence
  Description of Artificial Sequence: Synthetic oligonucleotide
uaaaaggccacaaa

SEQ ID NO: 35434 - RNA, 14 nt, Artificial Sequence
  Description of Artificial Sequence: Synthetic oligonucleotide
guaaaaggccacaa

SEQ ID NO: 35435 - RNA, 14 nt, Artificial Sequence
  Description of Artificial Sequence: Synthetic oligonucleotide
aguaaaaggccaca

SEQ ID NO: 35436 - RNA, 14 nt, Artificial Sequence
  Description of Artificial Sequence: Synthetic oligonucleotide
caguaaaaggccac

SEQ ID NO: 35437 - RNA, 14 nt, Artificial Sequence
  Description of Artificial Sequence: Synthetic oligonucleotide
acaguaaaaggcca

SEQ ID NO: 35438 - RNA, 14 nt, Artificial Sequence
  Description of Artificial Sequence: Synthetic oligonucleotide
cacaguaaaaggcc

SEQ ID NO: 35439 - RNA, 14 nt, Artificial Sequence
  Description of Artificial Sequence: Synthetic oligonucleotide
gcacaguaaaaggc

SEQ ID NO: 35440 - RNA, 14 nt, Artificial Sequence
  Description of Artificial Sequence: Synthetic oligonucleotide
agcacaguaaaagg

SEQ ID NO: 35441 - RNA, 14 nt, Artificial Sequence
  Description of Artificial Sequence: Synthetic oligonucleotide
aagcacaguaaaag

SEQ ID NO: 35442 - RNA, 14 nt, Artificial Sequence
  Description of Artificial Sequence: Synthetic oligonucleotide
aaagcacaguaaaa

SEQ ID NO: 35443 - RNA, 14 nt, Artificial Sequence
  Description of Artificial Sequence: Synthetic oligonucleotide
caaagcacaguaaa

SEQ ID NO: 35444 - RNA, 14 nt, Artificial Sequence
  Description of Artificial Sequence: Synthetic oligonucleotide
acaaagcacaguaa

SEQ ID NO: 35445 - RNA, 14 nt, Artificial Sequence
  Description of Artificial Sequence: Synthetic oligonucleotide
uacaaagcacagua

SEQ ID NO: 35446 - RNA, 14 nt, Artificial Sequence
  Description of Artificial Sequence: Synthetic oligonucleotide
auacaaagcacagu

SEQ ID NO: 35447 - RNA, 14 nt, Artificial Sequence
  Description of Artificial Sequence: Synthetic oligonucleotide
gauacaaagcacag

SEQ ID NO: 35448 - RNA, 14 nt, Artificial Sequence
  Description of Artificial Sequence: Synthetic oligonucleotide
ugauacaaagcaca

SEQ ID NO: 35449 - RNA, 14 nt, Artificial Sequence
  Description of Artificial Sequence: Synthetic oligonucleotide
cugauacaaagcac

SEQ ID NO: 35450 - RNA, 14 nt, Artificial Sequence
  Description of Artificial Sequence: Synthetic oligonucleotide
ucugauacaaagca

SEQ ID NO: 35451 - RNA, 14 nt, Artificial Sequence
  Description of Artificial Sequence: Synthetic oligonucleotide
cucugauacaaagc

SEQ ID NO: 35452 - RNA, 14 nt, Artificial Sequence
  Description of Artificial Sequence: Synthetic oligonucleotide
acucugauacaaag

SEQ ID NO: 35453 - RNA, 14 nt, Artificial Sequence
  Description of Artificial Sequence: Synthetic oligonucleotide
aacucugauacaaa

SEQ ID NO: 35454 - RNA, 14 nt, Artificial Sequence
  Description of Artificial Sequence: Synthetic oligonucleotide
gaacucugauacaa

SEQ ID NO: 35455 - RNA, 14 nt, Artificial Sequence
  Description of Artificial Sequence: Synthetic oligonucleotide
agaacucugauaca

SEQ ID NO: 35456 - RNA, 14 nt, Artificial Sequence
  Description of Artificial Sequence: Synthetic oligonucleotide
aagaacucugauac

SEQ ID NO: 35457 - RNA, 14 nt, Artificial Sequence
  Description of Artificial Sequence: Synthetic oligonucleotide
uaagaacucugaua

SEQ ID NO: 35458 - RNA, 14 nt, Artificial Sequence
  Description of Artificial Sequence: Synthetic oligonucleotide
uuaagaacucugau

SEQ ID NO: 35459 - RNA, 14 nt, Artificial Sequence
  Description of Artificial Sequence: Synthetic oligonucleotide
guuaagaacucuga

SEQ ID NO: 35460 - RNA, 14 nt, Artificial Sequence
  Description of Artificial Sequence: Synthetic oligonucleotide
uguuaagaacucug

SEQ ID NO: 35461 - RNA, 14 nt, Artificial Sequence
  Description of Artificial Sequence: Synthetic oligonucleotide
uuguuaagaacucu

SEQ ID NO: 35462 - RNA, 14 nt, Artificial Sequence
  Description of Artificial Sequence: Synthetic oligonucleotide
cuuguuaagaacuc

SEQ ID NO: 35463 - RNA, 14 nt, Artificial Sequence
  Description of Artificial Sequence: Synthetic oligonucleotide
ucuuguuaagaacu

SEQ ID NO: 35464 - RNA, 14 nt, Artificial Sequence
  Description of Artificial Sequence: Synthetic oligonucleotide
aucuuguuaagaac

SEQ ID NO: 35465 - RNA, 14 nt, Artificial Sequence
  Description of Artificial Sequence: Synthetic oligonucleotide
aaucuuguuaagaa

SEQ ID NO: 35466 - RNA, 14 nt, Artificial Sequence
  Description of Artificial Sequence: Synthetic oligonucleotide
uaaucuuguuaaga

SEQ ID NO: 35467 - RNA, 14 nt, Artificial Sequence
  Description of Artificial Sequence: Synthetic oligonucleotide
uuaaucuuguuaag

SEQ ID NO: 35468 - RNA, 14 nt, Artificial Sequence
  Description of Artificial Sequence: Synthetic oligonucleotide
auuaaucuuguuaa

SEQ ID NO: 35469 - RNA, 14 nt, Artificial Sequence
  Description of Artificial Sequence: Synthetic oligonucleotide
uauuaaucuuguua

SEQ ID NO: 35470 - RNA, 14 nt, Artificial Sequence
  Description of Artificial Sequence: Synthetic oligonucleotide
uuauuaaucuuguu

SEQ ID NO: 35471 - RNA, 14 nt, Artificial Sequence
  Description of Artificial Sequence: Synthetic oligonucleotide
uuuauuaaucuugu

SEQ ID NO: 35472 - RNA, 14 nt, Artificial Sequence
  Description of Artificial Sequence: Synthetic oligonucleotide
auuuauuaaucuug

SEQ ID NO: 35473 - RNA, 14 nt, Artificial Sequence
  Description of Artificial Sequence: Synthetic oligonucleotide
gauuuauuaaucuu

SEQ ID NO: 35474 - RNA, 14 nt, Artificial Sequence
  Description of Artificial Sequence: Synthetic oligonucleotide
ugauuuauuaaucu

SEQ ID NO: 35475 - RNA, 14 nt, Artificial Sequence
  Description of Artificial Sequence: Synthetic oligonucleotide
gugauuuauuaauc

SEQ ID NO: 35476 - RNA, 14 nt, Artificial Sequence
  Description of Artificial Sequence: Synthetic oligonucleotide
ggugauuuauuaau

SEQ ID NO: 35477 - RNA, 14 nt, Artificial Sequence
  Description of Artificial Sequence: Synthetic oligonucleotide
gggugauuuauuaa

SEQ ID NO: 35478 - RNA, 14 nt, Artificial Sequence
  Description of Artificial Sequence: Synthetic oligonucleotide
ggggugauuuauua

SEQ ID NO: 35479 - RNA, 14 nt, Artificial Sequence
  Description of Artificial Sequence: Synthetic oligonucleotide
uggggugauuuauu

SEQ ID NO: 35480 - RNA, 14 nt, Artificial Sequence
  Description of Artificial Sequence: Synthetic oligonucleotide
cuggggugauuuau

SEQ ID NO: 35481 - RNA, 14 nt, Artificial Sequence
  Description of Artificial Sequence: Synthetic oligonucleotide
acuggggugauuua

SEQ ID NO: 35482 - RNA, 14 nt, Artificial Sequence
  Description of Artificial Sequence: Synthetic oligonucleotide
gacuggggugauuu

SEQ ID NO: 35483 - RNA, 14 nt, Artificial Sequence
  Description of Artificial Sequence: Synthetic oligonucleotide
agacuggggugauu

SEQ ID NO: 35484 - RNA, 14 nt, Artificial Sequence
  Description of Artificial Sequence: Synthetic oligonucleotide
aagacuggggugau

SEQ ID NO: 35485 - RNA, 14 nt, Artificial Sequence
  Description of Artificial Sequence: Synthetic oligonucleotide
uaagacugggguga

SEQ ID NO: 35486 - RNA, 14 nt, Artificial Sequence
  Description of Artificial Sequence: Synthetic oligonucleotide
uuaagacuggggug

SEQ ID NO: 35487 - RNA, 14 nt, Artificial Sequence
  Description of Artificial Sequence: Synthetic oligonucleotide
auuaagacuggggu

SEQ ID NO: 35488 - RNA, 14 nt, Artificial Sequence
  Description of Artificial Sequence: Synthetic oligonucleotide
aauuaagacugggg

SEQ ID NO: 35489 - RNA, 14 nt, Artificial Sequence
  Description of Artificial Sequence: Synthetic oligonucleotide
aaauuaagacuggg

SEQ ID NO: 35490 - RNA, 14 nt, Artificial Sequence
  Description of Artificial Sequence: Synthetic oligonucleotide
aaaauuaagacugg

SEQ ID NO: 35491 - RNA, 14 nt, Artificial Sequence
  Description of Artificial Sequence: Synthetic oligonucleotide
aaaaauuaagacug

SEQ ID NO: 35492 - RNA, 14 nt, Artificial Sequence
  Description of Artificial Sequence: Synthetic oligonucleotide
uaaaaauuaagacu

SEQ ID NO: 35493 - RNA, 14 nt, Artificial Sequence
  Description of Artificial Sequence: Synthetic oligonucleotide
uuaaaaauuaagac

SEQ ID NO: 35494 - RNA, 14 nt, Artificial Sequence
  Description of Artificial Sequence: Synthetic oligonucleotide
uuuaaaaauuaaga

SEQ ID NO: 35495 - DNA, 14 bp, Artificial Sequence
  Description of Artificial Sequence: Synthetic oligonucleotide
aagagcatcatcat

SEQ ID NO: 35496 - DNA, 14 bp, Artificial Sequence
  Description of Artificial Sequence: Synthetic oligonucleotide
atgtctgcagaaat

SEQ ID NO: 35497 - RNA, 14 nt, Artificial Sequence
  Description of Artificial Sequence: Synthetic oligonucleotide
aagagcaucaucau

SEQ ID NO: 35498 - RNA, 14 nt, Artificial Sequence
  Description of Artificial Sequence: Synthetic oligonucleotide
augucugcagaaau

SEQ ID NO: 35499 - DNA, 14 bp, Artificial Sequence
  Description of Artificial Sequence: Synthetic oligonucleotide
actggttggacata

SEQ ID NO: 35500 - RNA, 14 nt, Artificial Sequence
  Description of Artificial Sequence: Synthetic oligonucleotide
uccuugcgaaaucu

SEQ ID NO: 35501 - RNA, 14 nt, Artificial Sequence
  Description of Artificial Sequence: Synthetic oligonucleotide
acugguuggacaua

SEQ ID NO: 35502 - protein, 5 aa, Artificial Sequence
  Description of Artificial Sequence: Synthetic peptide
EAAAK

SEQ ID NO: 35503 - DNA, 16 bp, Artificial Sequence
  Description of Artificial Sequence: Synthetic oligonucleotide
gctcgaatgatcggaa

SEQ ID NO: 35504 - DNA, 16 bp, Artificial Sequence
  Description of Artificial Sequence: Synthetic oligonucleotide
attcgactcaccacag

SEQ ID NO: 35505 - DNA, 16 bp, Artificial Sequence
  Description of Artificial Sequence: Synthetic oligonucleotide
tcgcctattgactgca
